(19) United States
(12) Patent Application Publication
(10) Pub. No.: US 2022/0162656 A1
(43) Pub. Date: May 26, 2022

(54) METHODS OF IMPROVING PRODUCTION OF MORPHINAN ALKALOIDS AND DERIVATIVES

(71) Applicant: Antheia, Inc., Menlo Park, CA (US)

(72) Inventors: Christina SMOLKE, Menlo Park, CA (US); Catherine THODEY, Menlo Park, CA (US); Kristy HAWKINS, Menlo Park, CA (US); Xuezhi LI, Menlo Park, CA (US); Amy KOZINA, Menlo Park, CA (US)

(21) Appl. No.: 17/486,274

(22) Filed: Sep. 27, 2021

Related U.S. Application Data
(63) Continuation of application No. PCT/US2020/024735, filed on Mar. 25, 2020.
(60) Provisional application No. 62/824,252, filed on Mar. 26, 2019.

(51) Int. Cl. C12P 17/18

(52) U.S. Cl. CPC C12P 17/188

(57) ABSTRACT

Methods and systems are provided for producing codeinone within an engineered non-plant cell. The method comprises, within the engineered non-plant cell, producing a thebaine product. The method also comprises, within the engineered non-plant cell, contacting the thebaine product with an enzyme having thebaine 6-O-demethylase activity, thereby producing a neopinone product. Additionally, the method comprises, within the engineered non-plant cell, contacting the neopinone product with a neopinone isomerase, thereby producing a codeinone product.

### CROSS REFERENCE

[0001] This application is a Continuation of International Application No. PCT/US2020/024735, filed on Mar. 25, 2020 which claims priority to U.S. Provisional Application No. 62/824,252, filed on Mar. 26, 2019, the disclosure of both are herein incorporated by referenced in their entirety.

[0002] This application is related to: U.S. patent application Ser. No. 14/211,611 now published as US 2014-0273109, which application was filed on Mar. 14, 2014 and has Attorney Docket No. STAN-1018; PCT Application Serial No. PCT/US2014/027833 now published as WO 2014/143744, which application was filed on Mar. 14, 2014 and has Attorney Docket No. STAN-1018WO; U.S. patent application Ser. No. 15/031,618, which application was filed on Apr. 22, 2016 and has Attorney Docket No. STAN-1078; Application Serial No. PCT/US2014/063738 now published as WO 2015/066642, which application was filed on Nov. 3, 2014 and has Attorney Docket No. STAN-1078WO; U.S. Provisional Patent Application Ser. No. 62/080,610, which was filed Nov. 17, 2014 and has Attorney Docket No. STAN-1169PRV; U.S. Provisional Patent Application Ser. No. 62/107,238, which was filed Jan. 23, 2015 and has Attorney Docket No. STAN-1169PRV2; Application Serial No. PCT/US2015/060891 which application was filed on Nov. 16, 2015 and has Attorney Docket No. STAN-1169WO; U.S. Provisional Patent Application Ser. No. 62/156,701, which was filed May 4, 2015 and has Attorney Docket No. STAN-1221PRV; Application Serial No. PCT/US2016/030808 which application was filed on May 4, 2016 and has Attorney Docket No. STAN-1221WO; Application Serial No. PCT/US2016/031506 which application was filed on May 9, 2016; Application Serial No. PCT/US2017/057237 which application was filed Oct. 18, 2017; Application Ser. No. 62/541,038 which application was filed on Aug. 3, 2017; Application Serial No. PCT/US2018/045222 which application was filed on Aug. 3, 2018; application Ser. No. 16/149,025 which application was filed on Oct. 1, 2018; United States Provisional Patent Application Ser. No. 62/628,264, which was filed Feb. 8, 2018; and Application Serial No. PCT/US2019/017357, which application was filed on Feb. 8, 2019; the disclosures of which applications are herein incorporated by reference.

### SUMMARY OF THE INVENTION

[0003] The present disclosure provides methods for the production of diverse benzylisoquinoline alkaloids (BIAs) in engineered host cells. The present disclosure further provides compositions of diverse alkaloids produced in engineered host cells. Additionally, the present disclosure provides methods for the production of one or more Bet v 1-fold proteins in engineered host cells. Additionally, the present disclosure provides methods for the production of a neopinone isomerase in engineered host cells. In particular cases, the disclosure provides methods for producing diverse alkaloid products through the conversion of a precursor morphinan alkaloid with a carbon-carbon double bond between carbons C-14 and C-8 into a product morphinan alkaloid with a carbon-carbon double bond between carbons C-8 and C-7 in an engineered host cell. In further particular cases, the present disclosure provides methods for producing diverse alkaloid products through the conversion of neopinone to codeinone.

[0004] In some embodiments, the disclosure provides methods for increasing production of diverse alkaloid products through the epimerization of a (S)-1-benzylisoquinoline alkaloid to a (R)-1-benyzlisoquinoline alkaloid via engineered epimerases in an engineered host cell. In further embodiments, the present disclosure provides methods for increasing production of diverse alkaloid products through the epimerization of (S)-reticuline to (R)-reticuline via an engineered epimerase comprising two separate enzymes encoding an oxidase and a reductase compared to the production of diverse alkaloid products through the epimerization of (S)-reticuline to (R)-reticuline via a wild-type epimerase.

[0005] While engineered split epimerases may be composed of a separate oxidase enzyme and reductase enzyme that originate from a parent or wild-type epimerase, engineered epimerases may also comprise a separate oxidase enzyme and reductase enzyme that originate from separate parent or wild-type epimerases. Examples of parent epimerases having an oxidase and reductase component comprise amino acid sequences selected from the group consisting of: SEQ ID NOs: 1, 2, 3, 4, 5, 6, 7, 8, 9, 10, 11, 12, 13, 14, 15, and 16, as listed in Table 1.

[0006] In some embodiments, the disclosure provides methods for increasing production of diverse alkaloid products through the conversion of a promorphinan alkaloid to a morphinan alkaloid via thebaine synthases in an engineered host cell. In further embodiments, the present disclosure provides methods for increasing production of diverse alkaloid products through the conversion of salutaridinol-7-O-acetate to thebaine via a thebaine synthase. Examples of parent thebaine synthases comprise amino acid sequences selected from the group consisting of: SEQ ID NOs: 30, 31, 32, 33, 34, 35, 36, and 37 as listed in Table 2.

[0007] In some embodiments, the disclosure provides methods for increasing production of diverse alkaloid products through the conversion of a promorphinan alkaloid to a morphinan alkaloid via engineered thebaine synthases in an engineered host cell. In further embodiments, the present disclosure provides methods for increasing production of diverse alkaloid products through the conversion of salutaridinol-7-O-acetate to thebaine via an engineered thebaine synthase.

[0008] In some embodiments, the engineered thebaine synthase is a fusion enzyme. In further embodiments, the thebaine synthase is fused to an acetyl transferase enzyme. In further embodiments, the thebaine synthase is encoded within an acetyl transferase enzyme. In other embodiments, the thebaine synthase is fused to a reductase enzyme.

[0009] In some embodiments, the disclosure provides methods for increasing production of diverse alkaloid products through the conversion of a precursor morphinan alkaloid with a carbon-carbon double bond between carbons C-14 and C-8 into a product morphinan alkaloid with a carbon-carbon double bond between carbons C-8 and C-7 via neopinone isomerases in an engineered host cell. In further embodiments, the precursor morphinan alkaloid with a carbon-carbon double bond between carbons C-14 and C-8 is produced in the engineered cell via a heterologous biosynthetic pathway comprising a plurality of enzymes and starting with simple starting materials such as sugar and/or L-tyrosine. In further embodiments, the present disclosure provides methods for increasing production of diverse alkaloid products through the conversion of neopinone to codeinone via a neopinone isomerase. Examples of parent neopinone isomerases comprise amino acid sequences selected from the group consisting of: SEQ ID NOs: 70, 71, 72, 73, 74, 75, 76, 77, 78, 79, 80, 81, 82, 83, 84, 85, and 86 as listed in Table 3.

[0010] In some embodiments, the disclosure provides methods for increasing production of diverse alkaloid products through the conversion of a precursor morphinan alkaloid with a carbon-carbon double bond between carbons C-14 and C-8 into a product morphinan alkaloid with a carbon-carbon double bond between carbons C-8 and C-7 via engineered neopinone isomerases in an engineered host cell. In further embodiments, the present disclosure provides methods for increasing production of diverse alkaloid products through the conversion of neopinone to codeinone via an engineered neopinone isomerase.

[0011] In some embodiments, the engineered neopinone isomerase is a fusion enzyme. In further embodiments, the neopinone isomerase is fused to an O-demethylase enzyme that acts on the morphinan alkaloid scaffold. In further embodiments, the neopinone isomerase is encoded within an O-demethylase enzyme. In other embodiments, the neopinone isomerase is fused to a reductase enzyme. In further embodiments, the neopinone isomerase is encoded within a reductase enzyme.

[0012] In some examples, an engineered non-plant cell comprises a plurality of coding sequences each encoding an enzyme that is selected from the group of enzymes listed in Table 5. In some examples, the heterologous coding sequences may be operably connected. Heterologous coding sequences that are operably connected may be within the same pathway of producing a particular benzylisoquinoline alkaloid product via a neopinone isomerase activity or an engineered neopinone isomerase activity.

[0013] In some embodiments this disclosure provides a method of converting a precursor morphinan alkaloid with a carbon-carbon double bond between carbons C-14 and C-8 into a product morphinan alkaloid with a carbon-carbon double bond between carbons C-8 and C-7, comprising contacting the precursor morphinan alkaloid with at least one enzyme, wherein contacting the precursor morphinan alkaloid with the at least one enzyme converts the precursor morphinan alkaloid with a carbon-carbon double bond between carbons C-14 and C-8 to a product morphinan alkaloid with a carbon-carbon double bond between carbons C-8 and C-7. In some cases, the at least one enzyme is produced by culturing an engineered non-plant cell having a coding sequence for encoding the at least one enzyme. In some cases, the at least one enzyme comprises a neopinone isomerase. In some cases, the neopinone isomerase comprises an amino acid sequence selected from the group consisting of: SEQ ID NOs: 70, 71, 72, 73, 74, 75, 76, 77, 78, 79, 80, 81, 82, 83, 84, 85, and 86. In some cases, the neopinone isomerase enzyme is a Bet v 1 fold protein.

[0014] In some cases, the method further comprises engineering the non-plant cell with a plurality of heterologous enzymes to produce the precursor morphinan alkaloid from simple starting materials such as sugar and/or L-tyrosine. In some cases, the method further comprises engineering the non-plant cell with at least one enzyme that converts the product morphinan alkaloid with a carbon-carbon double bond between carbons C-8 and C-7 to a downstream derivative. In some cases, the method further comprises recovering the product morphinan alkaloid with a carbon-carbon double bond between carbons C-8 and C-7, or a derivative thereof, from the cell culture.

### INCORPORATION BY REFERENCE

[0015] All publications, patents, and patent applications mentioned in this specification are herein incorporated by reference to the same extent as if each individual publication, patent, or patent application was specifically and individually indicated to be incorporated by reference.

### BRIEF DESCRIPTION OF THE DRAWINGS

[0016] The novel features of the invention are set forth with particularity in the appended claims. A better understanding of the features and advantages of the invention will be obtained by reference to the following detailed description that sets forth illustrative embodiments, in which the principles of the invention are utilized, and the accompanying drawings of which:

[0017] FIG. 1 illustrates a biosynthetic scheme for conversion of glucose to 4-HPAA, dopamine, 3,4-DHPAA, and 1-benzylisoquinoline alkaloids to reticuline, in accordance with some embodiments of the invention.

[0018] FIG. 2 illustrates examples of tyrosine hydroxylase activities, and synthesis, recycling, and salvage pathways of tetrahydrobiopterin associated with tyrosine 3-monooxygenase activities, in accordance with some embodiments of the invention.

[0019] FIG. 3 illustrates a biosynthetic scheme for conversion of L-tyrosine to reticuline via norcoclaurine and norlaudanosoline, in accordance with some embodiments of the invention.

[0020] FIG. 4 illustrates a biosynthetic scheme for conversion of L-tyrosine to morphinan alkaloids, including natural and semi-synthetic opioids, in accordance with some embodiments of the invention.

[0021] FIG. 5 illustrates a biosynthetic scheme for production of natural opioids, including isomers of codeine and morphine, in accordance with some embodiments of the invention.

[0022] FIG. 6 illustrates a biosynthetic scheme for production of nor-opioids and nal-opioids, in accordance with some embodiments of the invention.

[0023] FIG. 7 illustrates a biosynthetic scheme for production of noscapine and related pathway metabolites, in accordance with some embodiments of the invention.

[0024] FIG. 8 illustrates a biosynthetic scheme for production of sanguinarine and related pathway metabolites, in accordance with some embodiments of the invention.

[0025] FIG. 9 illustrates a biosynthetic scheme for production of berberine and related pathway metabolites, in accordance with some embodiments of the invention.

[0026] FIG. 10 illustrates a biosynthetic scheme for production of bisBIAs and related pathway metabolites, in accordance with some embodiments of the invention.

[0027] FIG. 11 illustrates an enzyme having opioid 6-O-demethylase activity, in accordance with some embodiments of the invention.

[0028] FIG. 12 illustrates an enzyme having opioid 3-O-demethylase activity, in accordance with some embodiments of the invention.

[0029] FIG. 13 illustrates an enzyme having opioid N-demethylase activity, in accordance with some embodiments of the invention.

[0030] FIG. 14 illustrates an enzyme having opioid 14-hydroxylase activity, in accordance with some embodiments of the invention.

[0031] FIG. 15 illustrates an enzyme having opioid alcohol oxidoreductase activity, in accordance with some embodiments of the invention.

[0032] FIG. 16 illustrates an enzyme having opioid reductase activity, in accordance with some embodiments of the invention.

[0033] FIG. 17 illustrates an enzyme having opioid isomerase activity, in accordance with some embodiments of the invention.

[0034] FIG. 18 illustrates an enzyme having N-methyltransferase activity, in accordance with some embodiments of the invention.

[0035] FIG. 19 illustrates yeast platform strains for the production of reticuline from L-tyrosine, in accordance with some embodiments of the invention.

[0036] FIG. 20 illustrates yeast strains for the production of thebaine and hydrocodone from L-tyrosine, in accordance with some embodiments of the invention.

[0037] FIG. 21 illustrates the production of the morphinan alkaloid codeine from sugar and L-tyrosine from engineered yeast strains, in accordance with some embodiments of the invention.

[0038] FIG. 22 illustrates the production of morphine from sugar and L-tyrosine from engineered yeast strains, in accordance with some embodiments of the invention.

[0039] FIG. 23 illustrates the production of hydrocodone from sugar and L-tyrosine from engineered yeast strains, in accordance with some embodiments of the invention.

[0040] FIG. 24 illustrates the functional expression of BM3 variants, in accordance with some embodiments of the invention.

### DETAILED DESCRIPTION OF THE INVENTION

[0041] The present disclosure provides methods for the production of diverse benzylisoquinoline alkaloids (BIAs) in engineered host cells. The present disclosure further provides compositions of diverse alkaloids produced in engineered host cells. Additionally, the present disclosure provides methods for the production of a neopinone isomerase in host cells engineered with a plurality of heterologous enzymes to produce a precursor morphinan alkaloid from simple starting materials such as sugar and/or L-tyrosine. Additionally, the present disclosure provides methods for the production of an engineered neopinone isomerase in host cells engineered with a plurality of heterologous enzymes to produce a precursor morphinan alkaloid from simple starting materials. In particular cases, the disclosure provides methods for producing morphinan, nal-opioid, and nor-opioid alkaloid products through the increased conversion of a precursor morphinan alkaloid to a product morphinan alkaloid isomer in an engineered host cell. In further particular cases, the disclosure provides methods for increasing production of morphinan, nal-opioid, and nor-opioid alkaloid products through the increased conversion of a precursor morphinan alkaloid to a product morphinan alkaloid isomer in host cells engineered with one or more enzymes to convert the product morphinan alkaloid isomer to a downstream alkaloid product. In further particular cases, the present disclosure provides methods for producing diverse alkaloid products through the increased conversion of a precursor morphinan alkaloid to a product morphinan alkaloid isomer.

### Benzylisoquinoline Alkaloids (BIAS) of Interest

[0042] Host cells which produce BIAs of interest are provided. In some examples, engineered strains of host cells such as the engineered strains of the invention provide a platform for producing benzylisoquinoline alkaloids of interest and modifications thereof across several structural classes including, but not limited to, precursor BIAs, benzylisoquinolines, promorphinans, morphinans, protoberberines, protopines, benzophenanthridines, secoberberines, phthalideisoquinolines, aporphines, bisbenzylisoquinolines, nal-opioids, nor-opioids, and others. Each of these classes is meant to include biosynthetic precursors, intermediates, and metabolites thereof, of any convenient member of an engineered host cell biosynthetic pathway that may lead to a member of the class. Non-limiting examples of compounds are given below for each of these structural classes. In some cases, the structure of a given example may or may not be characterized itself as a benzylisoquinoline alkaloid. The present chemical entities are meant to include all possible isomers, including single enantiomers, racemic mixtures, optically pure forms, mixtures of diastereomers, and intermediate mixtures.

[0043] Benzylisoquinoline alkaloid precursors may include, but are not limited to, norcoclaurine (NC) and norlaudanosoline (NL), as well as NC and NL precursors, such as tyrosine, tyramine, 4-hydroxyphenylacetaldehyde (4-HPAA), 4-hydroxyphenylpyruvic acid (4-HPPA), L-3,4-dihydroxyphenylalanine (L-DOPA), 3,4-dihydroxyphenylacetaldehyde (3,4-DHPAA), and dopamine. In some embodiments, the one or more BIA precursors are 3,4-dihydroxyphenylacetaldehyde (3,4-DHPAA) and dopamine. In certain instances, the one or more BIA precursors are 4-hydroxyphenylacetaldehyde (4-HPAA) and dopamine. In particular, NL and NC may be synthesized, respectively, from precursor molecules via a Pictet-Spengler condensation reaction, where the reaction may occur spontaneously or may by catalyzed by any convenient enzymes.

[0044] Benzylisoquinolines may include, but are not limited to, norcoclaurine, norlaudanosoline, coclaurine, 3′-hydroxycoclaurine, 4′-O-methylnorlaudanosoline, 4′-O-methyl-laudanosoline, N-methylnorcoclaurine, laudanosoline, N-methylcoclaurine, 3′-hydroxy-N-methylcoclaurine, reticuline, norreticuline, papaverine, laudanine, laudanosine, tetrahydropapaverine, 1,2-dihydropapaverine, and orientaline.

[0045] Promorphinans may include, but are not limited to, salutaridine, salutaridinol, and salutaridinol-7-O-acetate.

[0046] Morphinans may include, but are not limited to, thebaine, codeinone, codeine, morphine, morphinone, oripavine, neopinone, neopine, neomorphine, hydrocodone, dihydrocodeine, 14-hydroxycodeinone, oxycodone, 14-hydroxycodeine, morphinone, hydromorphone, dihydromorphine, dihydroetorphine, ethylmorphine, etorphine, metopon, buprenorphine, pholcodine, heterocodeine, and oxymorphone.

[0047] Protoberberines may include, but are not limited to, scoulerine, cheilanthifoline, stylopine, nandinine, jatrorrhizine, stepholidine, discretamine, cis-N-methylstylopine, tetrahydrocolumbamine, palmatine, tetrahydropalmatine, columbamine, canadine, N-methylcanadine, 1-hydroxycanadine, berberine, N-methyl-ophiocarpine, 1,13-dihydroxy-N-methylcanadine, and 1-hydroxy-10-O-acetyl-N-methylcanadine.

[0048] Protopines may include, but are not limited to, protopine, 6-hydroxyprotopine, allocryptopine, cryptopine, muramine, and thalictricine.

[0049] Benzophenanthridines may include, but are not limited to, dihydrosanguinarine, sanguinarine, dihydrocheilirubine, cheilirubine, dihydromarcapine, marcapine, and chelerythrine.

[0050] Secoberberines may include, but are not limited to, 4′-O-desmethylmacrantaldehyde, 4′-O-desmethylpapaveroxine, 4′-O-desmethyl-3-O-acetylpapaveroxine, papaveroxine, and 3-O-aceteylpapaveroxine.

[0051] Phthalideisoquinolines may include, but are not limited to, narcotolinehemiacetal, narcotinehemiacetal, narcotoline, noscapine, adlumidine, adlumine, (+) or (−)-bicuculline, capnoidine, carlumine, corledine, corlumidine, decumbenine, 5′-O-demethylnarcotine, (+) or (−)-α or β-hydrastine, and hypecoumine.

[0052] Aporphines may include, but are not limited to, magnoflorine, corytuberine, apomorphine, boldine, isoboldine, isothebaine, isocorytuberine, and glaufine.

[0053] Bisbenzylisoquinolines may include, but are not limited to, berbamunine, guattegaumerine, dauricine, and liensinine.

[0054] Nal-opioids may include, but are not limited to, naltrexone, naloxone, nalmefene, nalorphine, nalorphine, nalodeine, naldemedine, naloxegol, 6β-naltrexol, naltrindole, methylnaltrexone, methylsamidorphan, alvimopan, axelopran, bevenpran, dinicotinate, levallorphan, samidorphan, buprenorphine, dezocine, eptazocine, butorphanol, levorphanol, nalbuphine, pentazocine, phenazocine, norbinaltorphimine, and diprenorphine.

[0055] Nor-opioids may include, but are not limited to, norcodeine, noroxycodone, northebaine, norhydrocodone, nordihydro-codeine, nor-14-hydroxy-codeine, norcodeinone, nor-14-hydroxy-codeinone, normorphine, noroxymorphone, nororipavine, norhydro-morphone, nordihydro-morphine, nor-14-hydroxy-morphine, normorphinone, and nor-14-hydroxy-morphinone.

[0056] Other compounds that may be produced by the engineered strains of the invention may include, but are not limited to, rhoeadine, pavine, isopavine, and cularine.

[0057] In certain embodiments, the engineered strains of the invention may provide a platform for producing compounds related to tetrahydrobiopterin synthesis including, but not limited to, dihydroneopterin triphosphate, 6-pyruvoyl tetrahydropterin, 5,6,7,8-tetrahydrobiopterin, 7,8-dihydrobiopterin, tetrahydrobiopterin 4a-carbinolamine, quinonoid dihydrobiopterin, and biopterin.

### Host Cells

[0058] Any convenient cells may be utilized in the subject host cells and methods. In some cases, the host cells are non-plant cells. In some instances, the host cells may be characterized as microbial cells. In certain cases, the host cells are insect cells, mammalian cells, bacterial cells, fungal cells, or yeast cells. Any convenient type of host cell may be utilized in producing the subject BIA-producing cells, see, e.g., US2008/0176754, US2014/0273109, PCT/US2014/063738, PCT/US2016/030808, PCT/US2015/060891, PCT/US2016/031506, and PCT/US2017/057237, the disclosures of which are incorporated by reference in their entirety. Host cells of interest include, but are not limited to, bacterial cells, such as Bacillus subtilis, Escherichia coli, Streptomyces, Anabaena, Arthrobacter, Acetobacter, Acetobacterium, Bacillus, Bifidobacterium, Brachybacterium, Brevibacterium, Carnobacterium, Clostridium, Corynebacterium, Enterobacter, Escherichia, Gluconacetobacter, Gluconobacter, Hafnia, Halomonas, Klebsiella, Kocuria, Lactobacillus, Leucononstoc, Macrococcus, Methylomonas, Methylobacter, Methylocella, Methylococcus, Microbacterium, Micrococcus, Microcystis, Moorella, Oenococcus, Pediococcus, Prochlorococcus, Propionibacterium, Proteus, Pseudoalteromonas, Pseudomonas, Psychrobacter, Rhodobacter, Rhodococcus, Rhodopseudomonas, Serratia, Staphylococcus, Streptococcus, Streptomyces, Synechococcus, Synechocystis, Tetragenococcus, Weissella, Zymomonas, and Salmonella typhimuium cells, insect cells such as Drosophila melanogaster S2 and Spodoptera frupperda Sf9 cells, and yeast cells such as Saccharomyces cerevisiae, Schizosaccharomyces pombe, and Pichia pastoris cells. In some examples, the host cells are yeast cells or E. coli cells. In some cases, the host cell is a yeast cell. In some instances, the host cell is from a strain of yeast engineered to produce a BIA of interest, such as a (R)-1-benzylisoquinoline alkaloid. In some instances, the host cell is from a strain of yeast engineered to produce enzymes of interest. In some instances, the host cell is from a strain of yeast engineered to produce an engineered epimerase. In some embodiments, an engineered epimerase may be an engineered split epimerase. In some embodiments, an engineered epimerase may be an engineered fused epimerase. In some embodiments, epimerase activity may be encoded by separate oxidase and reductase enzymes. Additionally, in some embodiments an engineered epimerase may be able to more efficiently convert a (S)-1-benzylisoquinoline alkaloid to a (R)-1-benzylisoquinoline alkaloid relative to a parent epimerase. In some embodiments, a parent epimerase may be a wild-type epimerase. In some embodiments, a parent epimerase may be substantially similar to a wild-type epimerase. In some cases, a parent epimerase that is substantially similar to a wild-type epimerase may have an amino acid sequence that is at least 50% or more, 55% or more, 60% or more, 65% or more, 70% or more, 75% or more, 80% or more, 81% or more, 82% or more, 83% or more, 84% or more, 85% or more, 86% or more, 87% or more, 88% or more, 89% or more, 90% or more, 91% or more, 92% or more, 93% or more, 94% or more, 95% or more, 96% or more, 97% or more, 98% or more, or 99% or more similar to an amino acid sequence of a wild-type epimerase. In some embodiments, an engineered epimerase may be separated into smaller enzymes that exhibit oxidase and reductase activities that more efficiently convert a (S)-1-benzylisoquinoline alkaloid to a (R)-1-benzylisoquinoline alkaloid relative to its corresponding parent epimerase.

[0059] In some instances, the host cell is from a strain of yeast engineered to produce a thebaine synthase. The thebaine synthase may be able to more efficiently convert a salutaridinol-7-O-acetate to a thebaine relative to a spontaneous reaction. In some instances, the host cell is from a strain of yeast engineered to produce an engineered thebaine synthase. In some embodiments, an engineered thebaine synthase may be an engineered fusion enzyme. Additionally, the engineered thebaine synthase may be able to more efficiently convert a salutaridinol-7-O-acetate to a thebaine relative to a parent thebaine synthase. In some embodiments, the parent thebaine synthase may be a wild-type thebaine synthase. In some embodiments, a parent thebaine synthase may be substantially similar to a wild-type thebaine synthase. In some cases, a parent thebaine synthase that is substantially similar to a wild-type thebaine synthase may have an amino acid sequence that is at least 50% or more, 55% or more, 60% or more, 65% or more, 70% or more, 75% or more, 80% or more, 81% or more, 82% or more, 83% or more, 84% or more, 85% or more, 86% or more, 87% or more, 88% or more, 89% or more, 90% or more, 91% or more, 92% or more, 93% or more, 94% or more, 95% or more, 96% or more, 97% or more, 98% or more, or 99% or more similar to an amino acid sequence of a wild-type thebaine synthase. The engineered thebaine synthase may be engineered as a fusion enzyme to another enzyme to more efficiently convert a salutaridinol-7-O-acetate to a thebaine relative to the parent thebaine synthase.

[0060] In some instances, the host cell is from a strain of yeast engineered to produce a neopinone isomerase. The neopinone isomerase may be able to more efficiently convert a neopinone to a codeinone relative to a spontaneous reaction. In some instances, the host cell is from a strain of yeast engineered to produce an engineered neopinone isomerase. In some embodiments, an engineered neopinone isomerase may be an engineered fusion enzyme. Additionally, the engineered neopinone isomerase may be able to more efficiently convert a neopinone to a codeinone relative to a parent neopinone isomerase. In some embodiments, the parent neopinone isomerase may be a wild-type neopinone isomerase. In some embodiments, a parent neopinone isomerase may be substantially similar to a wild-type neopinone isomerase. In some cases, a parent neopinone isomerase that is substantially similar to a wild-type neopinone isomerase may have an amino acid sequence that is at least 50% or more, 55% or more, 60% or more, 65% or more, 70% or more, 75% or more, 80% or more, 81% or more, 82% or more, 83% or more, 84% or more, 85% or more, 86% or more, 87% or more, 88% or more, 89% or more, 90% or more, 91% or more, 92% or more, 93% or more, 94% or more, 95% or more, 96% or more, 97% or more, 98% or more, or 99% or more similar to an amino acid sequence of a wild-type neopinone isomerase. The engineered neopinone isomerase may be engineered as a fusion enzyme to another enzyme to more efficiently convert a neopinone to a codeinone relative to the parent neopinone isomerase.

[0061] Any of the host cells described in US2008/0176754, US2014/0273109, PCTUS2014/063738, PCT/US2016/030808, PCT/US2015/060891, PCT/US2016/031506, PCT/US2017/057237, and U.S. Provisional Application No. 62/627,264 by Smolke et al. may be adapted for use in the subject cells and methods. In certain embodiments, the yeast cells may be of the species Saccharomyces cerevisiae (S. cerevisiae). In certain embodiments, the yeast cells may be of the species Schizosaccharomyces pombe. In certain embodiments, the yeast cells may be of the species Pichia pastoris. Yeast is of interest as a host cell because cytochrome P450 proteins are able to fold properly into the endoplasmic reticulum membrane so that their activity is maintained. In some examples, cytochrome P450 proteins are involved in some biosynthetic pathways of interest. In additional examples, cytochrome P450 proteins are involved in the production of BIAs of interest. In further examples, cytochrome P450 proteins are involved in the production of an enzyme of interest.

[0062] Yeast strains of interest that find use in the invention include, but are not limited to, CEN.PK (Genotype: MATa/α ura3-52/ura3-52 trp1-289/trp1-289 leu2-3_112/leu2-3_112 his3 Δ1/his3 Δ1 MAL2-8C/MAL2-8C SUC2/SUC2), S288C, W303, D273-10B, X2180, A364A, Σ1278B, AB972, SK1, and FL100. In certain cases, the yeast strain is any of S288C (MATα; SUC2 mal mel gal2 CUP1 flo1 flo8-1 hap1), BY4741 (MATα; his3Δ1; leu2Δ0; met15Δ0; ura3Δ0), BY4742 (MATα; his3Δ1; leu2Δ0; lys2Δ0; ura3Δ0), BY4743 (MATα/MATα; his3Δ1/his3Δ1; leu2Δ0/leu2Δ0; met15Δ0/MET15; LYS2/lys2Δ0; ura3Δ0/ura3Δ0), and WAT11 or W(R), derivatives of the W303-B strain (MATα; ade2-1; his3-11, -15; leu2-3, -112; ura3-1; canR; cyr+) which express the Arabidopsis thaliana NADPH-P450 reductase ATR1 and the yeast NADPH-P450 reductase CPR1, respectively. In another embodiment, the yeast cell is W303alpha (MATα; his3-11, 15 trp1-1 leu2-3 ura3-1 ade2-1). The identity and genotype of additional yeast strains of interest may be found at EUROSCARF (web.uni-frankfurt.de/fb15/mikro/euroscarf/col_index.html).

[0063] In some instances, the host cell is a fungal cell. In certain embodiments, the fungal cells may be of the Aspergillus species and strains include Aspergillus niger (ATCC 1015, ATCC 9029, CBS 513.88), Aspergillus oryzae (ATCC 56747, RIB40), Aspergillus terreus (NIH 2624, ATCC 20542) and Aspergillus nidulans (FGSC A4).

[0064] In certain embodiments, heterologous coding sequences may be codon optimized for expression in Aspergillus sp. and expressed from an appropriate promoter. In certain embodiments, the promoter may be selected from phosphoglycerate kinase promoter (PGK), MbfA promoter, cytochrome c oxidase subunit promoter (CoxA), SrpB promoter, TvdA promoter, malate dehydrogenase promoter (MdhA), beta-mannosidase promoter (ManB). In certain embodiments, a terminator may be selected from glucoamylase terminator (GlaA) or TrpC terminator. In certain embodiments, the expression cassette consisting of a promoter, heterologous coding sequence, and terminator may be expressed from a plasmid or integrated into the genome of the host. In certain embodiments, selection of cells maintaining the plasmid or integration cassette may be performed with antibiotic selection such as hygromycin or nitrogen source utilization, such as using acetamide as a sole nitrogen source. In certain embodiments, DNA constructs may be introduced into the host cells using established transformation methods such as protoplast transformation, lithium acetate, or electroporation. In certain embodiments, cells may be cultured in liquid ME or solid MEA (3% malt extract, 0.5% peptone, and ±1.5% agar) or in Vogel's minimal medium with or without selection.

[0065] In some instances, the host cell is a bacterial cell. The bacterial cell may be selected from any bacterial genus. Examples of genuses from which the bacterial cell may come include Anabaena, Arthrobacter, Acetobacter, Acetobacterium, Bacillus, Bifidobacterium, Brachybacterium, Brevibacterium, Carnobacterium, Clostridium, Corynebacterium, Enterobacter, Escherichia, Gluconacetobacter, Gluconobacter, Hafnia, Halomonas, Klebsiella, Kocuria, Lactobacillus, Leucononstoc, Macrococcus, Methylomonas, Methylobacter, Methylocella, Methylococcus, Microbacterium, Micrococcus, Microcystis, Moorella, Oenococcus, Pediococcus, Prochlorococcus, Propionibacterium, Proteus, Pseudoalteromonas, Pseudomonas, Psychrobacter, Rhodobacter, Rhodococcus, Rhodopseudomonas, Serratia, Staphylococcus, Streptococcus, Streptomyces, Synechococcus, Synechocystis, Tetragenococcus, Weissella, and Zymomonas. Examples of bacterial species which may be used with the methods of this disclosure include Arthrobacter nicotianae, Acetobacter aceti, Arthrobacter arilaitensis, Bacillus cereus, Bacillus coagulans, Bacillus licheniformis, Bacillus pumilus, Bacillus sphaericus, Bacillus stearothermophilus, Bacillus subtilis, Bifidobacterium adolescentis, Brachybacterium tyrofermentans, Brevibacterium linens, Carnobacterium divergens, Corynebacterium flavescens, Enterococcus faecium, Gluconacetobacter europaeus, Gluconacetobacter johannae, Gluconobacter oxydans, Hafnia alvei, Halomonas elongata, Kocuria rhizophila, Lactobacillus acidifarinae, Lactobacillus jensenii, Lactococcus lactis, Lactobacillus yamanashiensis, Leuconostoc citreum, Macrococcus caseolyticus, Microbacterium foliorum, Micrococcus lylae, Oenococcus oeni, Pediococcus acidilactici, Propionibacterium acidipropionici, Proteus vulgaris, Pseudomonas fluorescens, Psychrobacter celer, Staphylococcus condimenti, Streptococcus thermophilus, Streptomyces griseus, Tetragenococcus halophilus, Weissella cibaria, Weissella koreensis, Zymomonas mobilis, Corynebacterium glutamicum, Bifidobacterium bifidum/breve/longum, Streptomyces lividans, Streptomyces coelicolor, Lactobacillus plantarum, Lactobacillus sakei, Lactobacillus casei, Pseudoalteromonas citrea, Pseudomonas putida, Clostridium ljungdahlii/aceficum/acetobutylicum/beijerinckii/butyricum, and Moorella themocellum/thermoacetica.

[0066] In certain embodiments, the bacterial cells may be of a strain of Escherichia coli. In certain embodiments, the strain of E. coli may be selected from BL21, DH5a, XL1-Blue, HB101, BL21, and K12. In certain embodiments, heterologous coding sequences may be codon optimized for expression in E. coli and expressed from an appropriate promoter. In certain embodiments, the promoter may be selected from T7 promoter, tac promoter, trc promoter, tetracycline-inducible promoter (tet), lac operon promoter (lac), lacO1 promoter. In certain embodiments, the expression cassette consisting of a promoter, heterologous coding sequence, and terminator may be expressed from a plasmid or integrated into the genome. In certain embodiments, the plasmid is selected from pUC19 or pBAD. In certain embodiments, selection of cells maintaining the plasmid or integration cassette may be performed with antibiotic selection such as kanamycin, chloramphenicol, streptomycin, spectinomycin, gentamycin, erythromycin or ampicillin. In certain embodiments, DNA constructs may be introduced into the host cells using established transformation methods such as conjugation, heat shock chemical transformation, or electroporation. In certain embodiments, cells may be cultured in liquid Luria-Bertani (LB) media at about 37° C. with or without antibiotics.

[0067] In certain embodiments, the bacterial cells may be a strain of Bacillus subtilis. In certain embodiments, the strain of B. subtilis may be selected from 1779, GP25, RO-NN-1, 168, BSn5, BEST195, 1A382, and 62178. In certain embodiments, heterologous coding sequences may be codon optimized for expression in Bacillus sp. and expressed from an appropriate promoter. In certain embodiments, the promoter may be selected from grac promoter, p43 promoter, or trnQ promoter. In certain embodiments, the expression cassette consisting of the promoter, heterologous coding sequence, and terminator may be expressed from a plasmid or integrated into the genome. In certain embodiments, the plasmid is selected from pHP13 pE194, pC194, pHT01, or pHT43. In certain embodiments, integrating vectors such as pDG364 or pDG1730 may be used to integrate the expression cassette into the genome. In certain embodiments, selection of cells maintaining the plasmid or integration cassette may be performed with antibiotic selection such as erythromycin, kanamycin, tetracycline, and spectinomycin. In certain embodiments, DNA constructs may be introduced into the host cells using established transformation methods such as natural competence, heat shock, or chemical transformation. In certain embodiments, cells may be cultured in liquid Luria-Bertani (LB) media at 37° C. or M9 medium plus glucose and tryptophan.

### Genetic Modifications to Host Cells

[0068] The host cells may be engineered to include one or more modifications (such as two or more, three or more, four or more, five or more, or even more modifications) that provide for the production of BIAs of interest. Additionally or alternatively, the host cells may be engineered to include one or more modifications (such as two or more, three or more, four or more, five or more, or even more modifications) that provide for the production of enzymes of interest. In some cases, a modification is a genetic modification, such as a mutation, addition, or deletion of a gene or fragment thereof, or transcription regulation of a gene or fragment thereof. As used herein, the term “mutation” refers to a deletion, insertion, or substitution of an amino acid(s) residue or nucleotide(s) residue relative to a reference sequence or motif. The mutation may be incorporated as a directed mutation to the native gene at the original locus. In some cases, the mutation may be incorporated as an additional copy of the gene introduced as a genetic integration at a separate locus, or as an additional copy on an episomal vector such as a 2μ or centromeric plasmid. In certain instances, the substrate inhibited copy of the enzyme is under the native cell transcriptional regulation. In some instances, the substrate inhibited copy of the enzyme is introduced with engineered constitutive or dynamic regulation of protein expression by placing it under the control of a synthetic promoter. In some examples, the object of one or more modifications may be a native gene. In some examples, the object of one or more modifications may be a non-native gene. In some examples, a non-native gene may be inserted into a host cell. In further examples, a non-native gene may be altered by one or more modifications prior to being inserted into a host cell.

[0069] An engineered host cell may overproduce one or more BIAs of interest. By overproduce is meant that the cell has an improved or increased production of a BIA molecule of interest relative to a control cell (e.g., an unmodified cell). By improved or increased production is meant both the production of some amount of the BIA of interest where the control has no BIA of interest production, as well as an increase of about 10% or more, such as about 20% or more, about 30% or more, about 40% or more, about 50% or more, about 60% or more, about 80% or more, about 100% or more, such as 2-fold or more, such as 5-fold or more, including 10-fold or more in situations where the control has some BIA of interest production.

[0070] An engineered host cell may overproduce one or more (S)-1-benzylisoquinoline alkaloids. In some cases, the engineered host cell may produce some amount of the (S)-1-benzylisoquinoline alkaloid of interest where the control has no (S)-1-benzylisoquinoline alkaloid production, as well as an increase of about 10% or more, such as about 20% or more, about 30% or more, about 40% or more, about 50% or more, about 60% or more, about 80% or more, about 100% or more, such as 2-fold or more, such as 5-fold or more, including 10-fold or more in situations where the control has some (S)-1-benzylisoquinoline alkaloid of interest production.

[0071] An engineered host cell may further overproduce one or more (R)-1-benzylisoquinoline alkaloids. In some cases, the engineered host cell may produce some amount of the (R)-1-benzylisoquinoline alkaloid of interest where the control has no (R)-1-benzylisoquinoline alkaloid production, as well as an increase of about 10% or more, such as about 20% or more, about 30% or more, about 40% or more, about 50% or more, about 60% or more, about 80% or more, about 100% or more, such as 2-fold or more, such as 5-fold or more, including 10-fold or more in situations where the control has some (R)-1-benzylisoquinoline alkaloid of interest production. An engineered host cell may further overproduce one or more of 1-benzylisoquinoline alkaloids.

[0072] An engineered host cell may further overproduce one or more morphinan alkaloids. In some cases, the engineered host cell may produce some amount of the morphinan alkaloid of interest where the control has no morphinan alkaloid production, as well as an increase of about 10% or more, such as about 20% or more, about 30% or more, about 40% or more, about 50% or more, about 60% or more, about 80% or more, about 100% or more, such as 2-fold or more, such as 5-fold or more, including 10-fold or more in situations where the control has some morphinan alkaloid of interest production. In some cases, the morphinan alkaloid is formed from a 1-benzylisoquinoline alkaloid product, or derivative thereof, of an epimerization reaction catalyzed by an engineered epimerase within an engineered host cell. The engineered epimerase may comprise two separate enzymes that work to produce an epimerase reaction. An engineered host cell may further overproduce one or more of promorphinan, nor-opioid, or nal-opioid alkaloids.

[0073] In some cases, the engineered host cell having an engineered split epimerase is capable of producing an increased amount of (R)-reticuline relative to a host cell having an engineered fused epimerase. In some cases, the engineered host cell having modifications to an oxidase portion of an engineered epimerase is capable of producing an increased amount of (R)-reticuline relative to a control host cell that lacks the one or more modifications to the oxidase portion of the engineered epimerase (e.g., as described herein). In certain instances, the increased amount of (R)-reticuline is about 10% or more relative to the control host cell, such as about 20% or more, about 30% or more, about 40% or more, about 50% or more, about 60% or more, about 80% or more, about 100% or more, about 2-fold or more, about 5-fold or more, or even about 10-fold or more relative to the control host cell. In some cases, (R)-reticuline is the product of an epimerization reaction catalyzed by at least one engineered epimerase within an engineered host cell. In these cases, (S)-reticuline may be the substrate of the epimerization reaction.

[0074] In some cases, the engineered host cell is capable of producing an increased amount of thebaine relative to a control host cell that lacks the one or more modifications (e.g., as described herein). In some cases, the engineered host cell having a thebaine synthase is capable of producing an increased amount of thebaine relative to a host cell that lacks a thebaine synthase. In some cases, the engineered host cell having an engineered thebaine synthase is capable of producing an increased amount of thebaine relative to a host cell having a parent thebaine synthase (e.g., as described herein). In certain instances, the increased amount of thebaine is about 10% or more relative to the control host cell, such as about 20% or more, about 30% or more, about 40% or more, about 50% or more, about 60% or more, about 80% or more, about 100% or more, about 2-fold or more, about 5-fold or more, or even about 10-fold or more relative to the control host cell. In some cases, thebaine is the product of a thebaine synthase reaction within an engineered host cell. In some cases, thebaine is the product of a thebaine synthase reaction catalyzed by at least one engineered thebaine synthase within an engineered host cell. In these cases, salutaridinol-7-O-acetate may be the substrate of the thebaine synthase reaction.

[0075] In some cases, the engineered host cell is capable of producing an increased amount of codeinone, or morphinan alkaloid product downstream from codeinone in a biosynthetic pathway, relative to a control host cell that lacks the one or more modifications (e.g., as described herein). In some cases, the engineered host cell having a neopinone isomerase is capable of producing an increased amount of codeinone, or morphinan alkaloid product downstream from codeinone in a biosynthetic pathway, relative to a host cell that lacks a neopinone isomerase. In some cases, the engineered host cell having an engineered neopinone isomerase is capable of producing an increased amount of codeinone, or morphinan alkaloid product downstream from codeinone in a biosynthetic pathway, relative to a host cell having a parent neopinone isomerase (e.g., as described herein). In certain instances, the increased amount of codeinone, or morphinan alkaloid product downstream from codeinone in a biosynthetic pathway, is about 10% or more relative to the control host cell, such as about 20% or more, about 30% or more, about 40% or more, about 50% or more, about 60% or more, about 80% or more, about 100% or more, about 2-fold or more, about 5-fold or more, or even about 10-fold or more relative to the control host cell. In some cases, codeinone is the product of a neopinone isomerase reaction within an engineered host cell. In some cases, codeinone is the product of a neopinone isomerase reaction catalyzed by at least one engineered neopinone isomerase within an engineered host cell. In these cases, neopinone may be the substrate of the neopinone isomerase reaction.

[0076] Additionally, an engineered host cell may overproduce one or more enzymes of interest. By overproduce is meant that the cell has an improved or increased production of an enzyme of interest relative to a control cell (e.g., an unmodified cell). By improved or increased production is meant both the production of some amount of the enzyme of interest where the control has no production, as well as an increase of about 10% or more, such as about 20% or more, about 30% or more, about 40% or more, about 50% or more, about 60% or more, about 80% or more, about 100% or more, such as 2-fold or more, such as 5-fold or more, including 10-fold or more in situations where the control has some enzyme of interest production.

[0077] An engineered host cell may overproduce one or more engineered DRS-DRR enzymes. In some cases, the engineered host cell may produce some amount of the engineered DRS-DRR epimerase where the control has no DRS-DRR enzyme production, or where the control has a same level of production of wild-type epimerases in comparison to the engineered host cell, as well as an increase of about 10% or more, such as about 20% or more, about 30% or more, about 40% or more, about 50% or more, about 60% or more, about 80% or more, about 100% or more, such as 2-fold or more, such as 5-fold or more, including 10-fold or more in situations where the control has some DRS-DRR enzyme production. In some cases, an engineered DRS-DRR epimerase may be an engineered split epimerase. In some cases, an engineered DRS-DRR epimerase may be an engineered fused epimerase.

[0078] An engineered host cell may overproduce one or more thebaine synthase enzymes. In some cases, the engineered host cell may produce some amount of the thebaine synthase enzyme where the control has no thebaine synthase enzyme production, as well as an increase of about 10% or more, such as about 20% or more, about 30% or more, about 40% or more, about 50% or more, about 60% or more, about 80% or more, about 100% or more, such as 2-fold or more, such as 5-fold or more, including 10-fold or more in situations where the control has some thebaine synthase enzyme production.

[0079] An engineered host cell may overproduce one or more engineered thebaine synthase enzymes. In some cases, the engineered host cell may produce some amount of the engineered thebaine synthase where the control has no thebaine synthase enzyme production, or where the control has a same level of production of wild-type thebaine synthase in comparison to the engineered host cell, as well as an increase of about 10% or more, such as about 20% or more, about 30% or more, about 40% or more, about 50% or more, about 60% or more, about 80% or more, about 100% or more, such as 2-fold or more, such as 5-fold or more, including 10-fold or more in situations where the control has some thebaine synthase enzyme production. In some cases, an engineered thebaine synthase may be an engineered fusion enzyme.

[0080] An engineered host cell may further overproduce one or more enzymes that are derived from the thebaine synthase enzyme. In some cases, the engineered host cell may produce some amount of the enzymes that are derived from the thebaine synthase enzyme, where the control has no production of enzymes that are derived from the thebaine synthase enzyme, as well as an increase of about 10% or more, such as about 20% or more, about 30% or more, about 40% or more, about 50% or more, about 60% or more, about 80% or more, about 100% or more, such as 2-fold or more, such as 5-fold or more, including 10-fold or more in situations where the control has some production of enzymes that are derived from the thebaine synthase enzyme.

[0081] An engineered host cell may overproduce one or more neopinone isomerase enzymes. In some cases, the engineered host cell may produce some amount of the neopinone isomerase enzyme where the control has no neopinone isomerase enzyme production, as well as an increase of about 10% or more, such as about 20% or more, about 30% or more, about 40% or more, about 50% or more, about 60% or more, about 80% or more, about 100% or more, such as 2-fold or more, such as 5-fold or more, including 10-fold or more in situations where the control has some neopinone isomerase enzyme production.

[0082] An engineered host cell may overproduce one or more engineered neopinone isomerase enzymes. In some cases, the engineered host cell may produce some amount of the engineered neopinone isomerase where the control has no neopinone isomerase enzyme production, or where the control has a same level of production of wild-type neopinone isomerase in comparison to the engineered host cell, as well as an increase of about 10% or more, such as about 20% or more, about 30% or more, about 40% or more, about 50% or more, about 60% or more, about 80% or more, about 100% or more, such as 2-fold or more, such as 5-fold or more, including 10-fold or more in situations where the control has some neopinone isomerase enzyme production. In some cases, an engineered neopinone isomerase may be an engineered fusion enzyme.

[0083] An engineered host cell may further overproduce one or more enzymes that are derived from the neopinone isomerase enzyme. In some cases, the engineered host cell may produce some amount of the enzymes that are derived from the neopinone isomerase enzyme, where the control has no production of enzymes that are derived from the neopinone isomerase enzyme, as well as an increase of about 10% or more, such as about 20% or more, about 30% or more, about 40% or more, about 50% or more, about 60% or more, about 80% or more, about 100% or more, such as 2-fold or more, such as 5-fold or more, including 10-fold or more in situations where the control has some production of enzymes that are derived from the neopinone isomerase enzyme.

[0084] Additionally, an engineered host cell may overproduce one or more bisbenzylisoquinoline alkaloids (bisBIAs). In particular, an engineered host cell is capable of producing an increased amount of bisbenzylisoquinoline alkaloids (bisBIAs) relative to a control host cell that lacks the one or more modifications (e.g., as described herein), including modifications related to harboring an engineered epimerase. In certain instances, the increased amount of bisBIAs is about 10% or more relative to the control host cell, such as about 20% or more, about 30% or more, about 40% or more, about 50% or more, about 60% or more, about 80% or more, about 100% or more, about 2-fold or more, about 5-fold or more, or even about 10-fold or more relative to the control host cell. In some cases, the bisBIA is formed from at least one BIA monomer that is the product, or derivative thereof, of an epimerization reaction catalyzed by an engineered epimerase within an engineered host cell. The engineered epimerase may comprise two separate enzymes that work to produce an epimerase reaction. An engineered host cell may further overproduce one or more of cepharanthine, fangchinoline, liensinine, neferine, tubocurarine, dauricine, tetrandrine, curine, berbamunine, guattegaumerine, 2′-norberbamunine, and berbamine.

[0085] In some cases, the one or more (such as two or more, three or more, or four or more) modifications may be selected from: a localization mutation; a cytochrome P450 reductase interaction mutation; an accessibility mutation; an activity enhancing mutation; an engineered fused epimerase modification; an engineered thebaine synthase modification; an engineered neopinone isomerase modification; and an engineered split epimerase modification. A cell that includes one or more modifications may be referred to as an engineered cell.

### Substrate Inhibition Alleviating Mutations

[0086] In some instances, the engineered host cells are cells that include one or more substrate inhibition alleviating mutations (such as two or more, three or more, four or more, five or more, or even more) in one or more biosynthetic enzyme genes of the cell. In some examples, the one or more biosynthetic enzyme genes are native to the cell (e.g., is present in an unmodified cell). In some examples, the one or more biosynthetic enzyme genes are non-native to the cell. As used herein, the term “substrate inhibition alleviating mutation” refers to a mutation that alleviates a substrate inhibition control mechanism of the cell.

[0087] A mutation that alleviates substrate inhibition reduces the inhibition of a regulated enzyme in the cell of interest relative to a control cell and provides for an increased level of the regulated compound or a downstream biosynthetic product thereof. In some cases, by alleviating inhibition of the regulated enzyme is meant that the IC₅₀ of inhibition is increased by 2-fold or more, such as by 3-fold or more, 5-fold or more, 10-fold or more, 30-fold or more, 100-fold or more, 300-fold or more, 1000-fold or more, or even more. By increased level is meant a level that is 110% or more of that of the regulated compound in a control cell or a downstream product thereof, such as 120% or more, 130% or more, 140% or more, 150% or more, 160% or more, 170% or more, 180% or more, 190% or more, or 200% or more, such as at least 3-fold or more, at least 5-fold or more, at least 10-fold or more or even more of the regulated compound in the engineered host cell or a downstream product thereof.

[0088] A variety of substrate inhibition control mechanisms and biosynthetic enzymes in the engineered host cell that are directed to regulation of levels of BIAs of interest, or precursors thereof, may be targeted for substrate inhibition alleviation. The engineered host cell may include one or more substrate inhibition alleviating mutations in one or more biosynthetic enzyme genes. The one or more mutations may be located in any convenient biosynthetic enzyme genes where the biosynthetic enzyme is subject to regulatory control. In some embodiments, the one or more biosynthetic enzyme genes encode one or more tyrosine hydroxylase enzymes. In certain instances, the one or more substrate inhibition alleviating mutations are present in a biosynthetic enzyme gene that is TyrH. In some embodiments, the engineered host cell may include one or more substrate inhibition alleviating mutations in one or more biosynthetic enzyme genes such as one of those genes described in Table 5.

[0089] In certain embodiments, the one or more substrate inhibition alleviating mutations are present in the TyrH gene. The TyrH gene encodes tyrosine hydroxylase, which is an enzyme that converts tyrosine to L-DOPA. However, TyrH is inhibited by its substrate, tyrosine Mammalian tyrosine hydroxylase activity, such as that seen in humans or rats, can be improved through mutations to the TyrH gene that relieve substrate inhibition. In particular, substrate inhibition from tyrosine can be relieved by a point mutation W166Y in the TyrH gene. The point mutation W166Y in the TyrH gene may also improve the binding of the cosubstrate of tyrosine hydroxylase, BH₄, to catalyze the reaction of tyrosine to L-DOPA. The mutants of TyrH, when expressed in yeast strains to produce BIAs from sugar (such as those described in U.S. Provisional Patent Application Ser. No. 61/899,496) can significantly improve the production of BIAs.

[0090] Any convenient numbers and types of mutations may be utilized to alleviate a substrate inhibition control mechanism. In certain embodiments, the engineered host cells of the present invention may include 1 or more, 2 or more, 3 or more, 4 or more, 5 or more, 6 or more, 7 or more, 8 or more, 9 or more, 10 or more, 11 or more, 12 or more, 13 or more, 14 or more, or even 15 or more substrate inhibition alleviating mutations, such as 1, 2, 3, 4, 5, 6, 7, 8, 9, 10, 11, 12, 13, 14 or 15 substrate inhibition alleviating mutations in one or more biosynthetic enzyme genes within the engineered host cell.

### Cofactor Recovery Promoting Mechanisms

[0091] In some instances, the engineered host cells are cells that include one or more cofactor recovery promoting mechanisms (such as two or more, three or more, four or more, five or more, or even more) in one or more biosynthetic enzyme genes of the cell. In some examples, the one or more biosynthetic enzyme genes are native to the cell (e.g., is present in an unmodified cell). In some examples, the one or more biosynthetic enzyme genes are non-native to the cell. As used herein, the term “cofactor recovery promoting mechanism” refers to a mechanism that promotes a cofactor recovery control mechanism of the cell.

[0092] A variety of cofactor recovery control mechanisms and biosynthetic enzymes in the engineered host cell that are directed to regulation of levels of BIAs of interest, or precursors thereof, may be targeted for cofactor recovery promotion. The engineered host cell may include one or more cofactor recovery promoting mechanism in one or more biosynthetic enzyme genes. In some examples, the engineered host cell may include a heterologous coding sequence that encodes dihydrofolate reductase (DHFR). When DHFR is expressed, it may convert 7,8-dihydrobiopterin (BH₂) to the tetrahydrobiopterin (BH₄), thereby recovering BH₄ as a TyrH cosubstrate. In some examples, the engineered host cell may include one or more cofactor recovery promoting mechanisms in one or more biosynthetic enzyme genes such as one of those genes described in Table 5.

[0093] Any convenient numbers and types of mechanisms may be utilized to promote a cofactor recovery control mechanism. In certain embodiments, the engineered host cells of the present invention may include 1 or more, 2 or more, 3 or more, 4 or more, 5 or more, 6 or more, 7 or more, 8 or more, 9 or more, 10 or more, 11 or more, 12 or more, 13 or more, 14 or more, or even 15 or more cofactor recovery promoting mechanisms such as 1, 2, 3, 4, 5, 6, 7, 8, 9, 10, 11, 12, 13, 14 or 15 cofactor recovery promoting mechanisms in one or more biosynthetic enzyme genes within the engineered host cell.

### Product Inhibition Alleviating Mutations

[0094] In some instances, the engineered host cells are cells that include one or more product inhibition alleviating mutations (such as two or more, three or more, four or more, five or more, or even more) in one or more biosynthetic enzyme genes of the cell. In some examples, the one or more biosynthetic enzyme genes are native to the cell (e.g., is present in an unmodified cell). In some examples, the one or more biosynthetic enzyme genes are non-native to the cell. As used herein, the term “product inhibition alleviating mutation” refers to a mutation that alleviates a short term and/or long term product inhibition control mechanism of an engineered host cell. Short term product inhibition is a control mechanism of the cell in which there is competitive binding at a cosubstrate binding site. Long term product inhibition is a control mechanism of the cell in which there is irreversible binding of a compound away from a desired pathway.

[0095] A mutation that alleviates product inhibition reduces the inhibition of a regulated enzyme in the cell of interest relative to a control cell and provides for an increased level of the regulated compound or a downstream biosynthetic product thereof. In some cases, by alleviating inhibition of the regulated enzyme is meant that the IC₅₀ of inhibition is increased by 2-fold or more, such as by 3-fold or more, 5-fold or more, 10-fold or more, 30-fold or more, 100-fold or more, 300-fold or more, 1000-fold or more, or even more. By increased level is meant a level that is 110% or more of that of the regulated compound in a control cell or a downstream product thereof, such as 120% or more, 130% or more, 140% or more, 150% or more, 160% or more, 170% or more, 180% or more, 190% or more, or 200% or more, such as at least 3-fold or more, at least 5-fold or more, at least 10-fold or more or even more of the regulated compound in the engineered host cell or a downstream product thereof.

[0096] A variety of product inhibition control mechanisms and biosynthetic enzymes in the engineered host cell that are directed to regulation of levels of BIAs of interest may be targeted for product inhibition alleviation. The engineered host cell may include one or more product inhibition alleviating mutations in one or more biosynthetic enzyme genes. The mutation may be located in any convenient biosynthetic enzyme genes where the biosynthetic enzyme is subject to regulatory control. In some embodiments, the one or more biosynthetic enzyme genes encode one or more tyrosine hydroxylase enzymes. In certain instances, the one or more product inhibition alleviating mutations are present in a biosynthetic enzyme gene that is TyrH. In some embodiments, the engineered host cell includes one or more product inhibition alleviating mutations in one or more biosynthetic enzyme genes such as one of those genes described in Table 5.

[0097] In certain embodiments, the one or more product inhibition alleviating mutations are present in the TyrH gene. The TyrH gene encodes tyrosine hydroxylase, which is an enzyme that converts tyrosine to L-DOPA. TyrH requires tetrahydrobiopterin (BH₄) as a cosubstrate to catalyze the hydroxylation reaction. Some microbial strains, such as Saccharomyces cerevisiae, do not naturally produce BH₄, but can be engineered to produce this substrate through a four-enzyme synthesis and recycling pathway, as illustrated in FIG. 2. FIG. 2 illustrates examples of synthesis, recycling, and salvage pathways of tetrahydrobiopterin, in accordance with some embodiments of the invention. FIG. 2 provides the use of the enzymes PTPS, pyruvoyl tetrahydropterin synthase; SepR, sepiapterin reductase; PCD, pterin 4a-carbinolamine dehydratase; QDHPR, dihydropteridine reductase; and DHFR, dihydrofolate reductase. Of the enzymes that are illustrated in FIG. 2, yeast synthesizes an endogenous GTP cyclohydrolase I. GTP and dihydroneopterin triphosphate are naturally synthesized in yeast. Additionally, other metabolites in FIG. 2 are not naturally produced in yeast.

[0098] TyrH is inhibited by its product L-DOPA, as well as other catecholamines, particularly dopamine. Mammalian tyrosine hydroxylase activity, such as from humans or rats, can be improved through mutations that relieve product inhibition. For example, short term product inhibition, such as competitive binding at the cosubstrate binding site, can be relieved by a point mutation W166Y on the TyrH gene. In particular, the point mutation W166Y on the TyrH gene may improve binding of the cosubstrate. Additionally, short term product inhibition to relieve competitive binding at the cosubstrate binding site may be improved by a point mutation S40D on the TyrH gene. Short term product inhibition may also be improved by the joint mutations of R37E, R38E on the TyrH gene. In particular, R37E, R38E mutations may together specifically improve tyrosine hydroxylase activity in the presence of dopamine.

[0099] Additionally, long term product inhibition may be relieved by point mutations on the TyrH gene. Long term product inhibition relief may include the irreversible binding of catecholamine to iron in the active site such that there is less catecholamine present to act as a product inhibitor of tyrosine hydroxylase activity. Long term product inhibition can be relieved by the mutations E332D and Y371F, respectively, in the TyrH gene.

[0100] Combinations of the mutations can be made (such as two or three or more mutations at once) to relieve multiple types of substrate and product inhibition to further improve the activity of TyrH. The mutants of TyrH, when expressed in yeast strains to produce BIAs from sugar (such as those described in U.S. Provisional Patent Application Ser. No. 61/899,496) can significantly improve the production of BIAs.

[0101] Any convenient numbers and types of mutations may be utilized to alleviate a product inhibition control mechanism. In certain embodiments, the engineered host cells of the present invention may include 1 or more, 2 or more, 3 or more, 4 or more, 5 or more, 6 or more, 7 or more, 8 or more, 9 or more, 10 or more, 11 or more, 12 or more, 13 or more, 14 or more, or even 15 or more product inhibition alleviating mutations, such as 1, 2, 3, 4, 5, 6, 7, 8, 9, 10, 11, 12, 13, 14 or 15 product inhibition alleviating mutations in one or more biosynthetic enzyme genes within the engineered host cell.

### Feedback Inhibition Alleviating Mutations

[0102] In some instances, the engineered host cells are cells that include one or more feedback inhibition alleviating mutations (such as two or more, three or more, four or more, five or more, or even more) in one or more biosynthetic enzyme genes of the cell. In some cases, the one or more biosynthetic enzyme genes are native to the cell (e.g., is present in an unmodified cell). Additionally or alternatively, in some examples the one or more biosynthetic enzyme genes are non-native to the cell. As used herein, the term “feedback inhibition alleviating mutation” refers to a mutation that alleviates a feedback inhibition control mechanism of an engineered host cell. Feedback inhibition is a control mechanism of the cell in which an enzyme in the synthetic pathway of a regulated compound is inhibited when that compound has accumulated to a certain level, thereby balancing the amount of the compound in the cell. A mutation that alleviates feedback inhibition reduces the inhibition of a regulated enzyme in the engineered host cell relative to a control cell. In this way, engineered host cell provides for an increased level of the regulated compound or a downstream biosynthetic product thereof. In some cases, by alleviating inhibition of the regulated enzyme is meant that the IC₅₀ of inhibition is increased by 2-fold or more, such as by 3-fold or more, 5-fold or more, 10-fold or more, 30-fold or more, 100-fold or more, 300-fold or more, 1000-fold or more, or even more. By increased level is meant a level that is 110% or more of that of the regulated compound in a control cell or a downstream product thereof, such as 120% or more, 130% or more, 140% or more, 150% or more, 160% or more, 170% or more, 180% or more, 190% or more, or 200% or more, such as at least 3-fold or more, at least 5-fold or more, at least 10-fold or more or even more of the regulated compound in the host cell or a downstream product thereof.

[0103] A variety of feedback inhibition control mechanisms and biosynthetic enzymes that are directed to regulation of levels of BIAs of interest may be targeted for alleviation in the host cell. The host cell may include one or more feedback inhibition alleviating mutations in one or more biosynthetic enzyme genes native to the cell. The one or more mutations may be located in any convenient biosynthetic enzyme genes where the biosynthetic enzyme is subject to regulatory control. In some embodiments, the one or more biosynthetic enzyme genes may encode one or more enzymes selected from a 3-deoxy-d-arabinose-heptulosonate-7-phosphate (DAHP) synthase and a chorismate mutase. In some embodiments, the one or more biosynthetic enzyme genes encode a 3-deoxy-d-arabinose-heptulosonate-7-phosphate (DAHP) synthase. In some instances, the one or more biosynthetic enzyme genes may encode a chorismate mutase. In certain instances, the one or more feedback inhibition alleviating mutations may be present in a biosynthetic enzyme gene selected from ARO4 and ARO7. In certain instances, the one or more feedback inhibition alleviating mutations may be present in a biosynthetic enzyme gene that is ARO4. In certain instances, the one or more feedback inhibition alleviating mutations are present in a biosynthetic enzyme gene that is ARO7. In some embodiments, the engineered host cell may include one or more feedback inhibition alleviating mutations in one or more biosynthetic enzyme genes such as one of those genes described in Table 5.

[0104] Any convenient numbers and types of mutations may be utilized to alleviate a feedback inhibition control mechanism. As used herein, the term “mutation” refers to a deletion, insertion, or substitution of an amino acid(s) residue or nucleotide(s) residue relative to a reference sequence or motif. The mutation may be incorporated as a directed mutation to the native gene at the original locus. In some cases, the mutation may be incorporated as an additional copy of the gene introduced as a genetic integration at a separate locus, or as an additional copy on an episomal vector such as a 2μ or centromeric plasmid. In certain instances, the feedback inhibited copy of the enzyme is under the native cell transcriptional regulation. In some instances, the feedback inhibited copy of the enzyme is introduced with engineered constitutive or dynamic regulation of protein expression by placing it under the control of a synthetic promoter.

[0105] In certain embodiments, the one or more feedback inhibition alleviating mutations may be present in the ARO4 gene. ARO4 mutations of interest may include, but are not limited to, substitution of the lysine residue at position 229 with a leucine, a substitution of the glutamine residue at position 166 with a lysine residue, or a mutation as described by Hartmann M, et al. ((2003) Proc Natl Acad Sci USA 100(3):862-867) or Fukuda et al. ((1992) J Ferment Bioeng 74(2):117-119). In some instances, mutations for conferring feedback inhibition may be selected from a mutagenized library of enzyme mutants. Examples of such selections may include rescue of growth of o-fluoro-D,L-phenylalanine or growth of aro3 mutant yeast strains in media with excess tyrosine as described by Fukuda et al. ((1990) Breeding of Brewing Yeast Producing a Large Amount of Beta-Phenylethyl Alcohol and Beta-Phenylethyl Acetate. Agr Biol Chem Tokyo 54(1):269-271).

[0106] In certain embodiments, the engineered host cells of the present invention may include 1 or more, 2 or more, 3 or more, 4 or more, 5 or more, 6 or more, 7 or more, 8 or more, 9 or more, 10 or more, 11 or more, 12 or more, 13 or more, 14 or more, or even 15 or more feedback inhibition alleviating mutations, such as 1, 2, 3, 4, 5, 6, 7, 8, 9, 10, 11, 12, 13, 14 or 15 feedback inhibition alleviating mutations in one or more biosynthetic enzyme genes within the engineered host cell.

### Transcriptional Modulation Modifications

[0107] The host cells may include one or more transcriptional modulation modifications (such as two or more, three or more, four or more, five or more, or even more modifications) of one or more biosynthetic enzyme genes of the cell. In some examples, the one or more biosynthetic enzyme genes are native to the cell. In some examples, the one or more biosynthetic enzyme genes are non-native to the cell. Any convenient biosynthetic enzyme genes of the cell may be targeted for transcription modulation. By transcription modulation is meant that the expression of a gene of interest in a modified cell is modulated, e.g., increased or decreased, enhanced or repressed, relative to a control cell (e.g., an unmodified cell). In some cases, transcriptional modulation of the gene of interest includes increasing or enhancing expression. By increasing or enhancing expression is meant that the expression level of the gene of interest is increased by 2-fold or more, such as by 5-fold or more and sometimes by 25-, 50-, or 100-fold or more and in certain embodiments 300-fold or more or higher, as compared to a control, i.e., expression in the same cell not modified (e.g., by using any convenient gene expression assay). Alternatively, in cases where expression of the gene of interest in a cell is so low that it is undetectable, the expression level of the gene of interest is considered to be increased if expression is increased to a level that is easily detectable. In certain instances, transcriptional modulation of the gene of interest includes decreasing or repressing expression. By decreasing or repressing expression is meant that the expression level of the gene of interest is decreased by 2-fold or more, such as by 5-fold or more and sometimes by 25-, 50-, or 100-fold or more and in certain embodiments 300-fold or more or higher, as compared to a control. In some cases, expression is decreased to a level that is undetectable. Modifications of host cell processes of interest that may be adapted for use in the subject host cells are described in U.S. Publication No. 20140273109 (Ser. No. 14/211,611) by Smolke et al., the disclosure of which is herein incorporated by reference in its entirety.

[0108] Any convenient biosynthetic enzyme genes may be transcriptionally modulated, and include but are not limited to, those biosynthetic enzymes described in FIG. 1. In particular, FIG. 1 illustrates a biosynthetic scheme for conversion of glucose to 4-HPAA, dopamine, and 3,4-DHPAA, in accordance with some embodiments of the invention. Examples of enzymes described in FIG. 1 include ARO3, ARO4, ARO1, ARO7, TYR1, TYR, TyrH, DODC, MAO, ARO10, ARO9, and ARO8. In some instances, the one or more biosynthetic enzyme genes may be selected from ARO10, ARO9, ARO8, and TYR1. In some cases, the one or more biosynthetic enzyme genes may be ARO10. In certain instances, the one or more biosynthetic enzyme genes may be ARO9. In some embodiments, the one or more biosynthetic enzyme genes may be TYR1. In some embodiments, the host cell includes one or more transcriptional modulation modifications to one or more genes such as one of those genes described in Table 5.

[0109] In some embodiments, the transcriptional modulation modification may include a substitution of a strong promoter for a native promoter of the one or more biosynthetic enzyme genes or the expression of an additional copy(ies) of the gene or genes under the control of a strong promoter. The promoters driving expression of the genes of interest may be constitutive promoters or inducible promoters, provided that the promoters may be active in the host cells. The genes of interest may be expressed from their native promoters. Additionally or alternatively, the genes of interest may be expressed from non-native promoters. Although not a requirement, such promoters may be medium to high strength in the host in which they are used. Promoters may be regulated or constitutive. In some embodiments, promoters that are not glucose repressed, or repressed only mildly by the presence of glucose in the culture medium, may be used. There are numerous suitable promoters, examples of which include promoters of glycolytic genes such as the promoter of the B. subtilis tsr gene (encoding fructose biphosphate aldolase) or GAPDH promoter from yeast S. cerevisiae (coding for glyceraldehyde-phosphate dehydrogenase) (Bitter G. A., Meth. Enzymol. 152:673 684 (1987)). Other strong promoters of interest include, but are not limited to, the ADHI promoter of baker's yeast (Ruohonen L., et al, J. Biotechnol. 39:193 203 (1995)), the phosphate-starvation induced promoters such as the PHOS promoter of yeast (Hinnen, A., et al, in Yeast Genetic Engineering, Barr, P. J., et al. eds, Butterworths (1989), the alkaline phosphatase promoter from B. licheniformis (Lee. J. W. K., et al., J. Gen. Microbiol. 137:1127 1133 (1991)), GPD1, and TEF1. Yeast promoters of interest include, but are not limited to, inducible promoters such as Gall-10, Gall, GalL, GalS, repressible promoter Met25, tetO, and constitutive promoters such as glyceraldehyde 3-phosphate dehydrogenase promoter (GPD), alcohol dehydrogenase promoter (ADH), translation-elongation factor-1-alpha promoter (TEF), cytochrome c-oxidase promoter (CYC1), MRP7 promoter, etc. In some instances, the strong promoter is GPD1. In certain instances, the strong promoter is TEF1. Autonomously replicating yeast expression vectors containing promoters inducible by hormones such as glucocorticoids, steroids, and thyroid hormones are also known and include, but are not limited to, the glucorticoid responsive element (GRE) and thyroid hormone responsive element (TRE), see e.g., those promoters described in U.S. Pat. No. 7,045,290. Vectors containing constitutive or inducible promoters such as alpha factor, alcohol oxidase, and PGH may be used. Additionally any convenient promoter/enhancer combination (as per the Eukaryotic Promoter Data Base EPDB) could also be used to drive expression of genes of interest. It is understood that any convenient promoters specific to the host cell may be selected, e.g., E. coli. In some cases, promoter selection may be used to optimize transcription, and hence, enzyme levels to maximize production while minimizing energy resources.

### Inactivating Mutations

[0110] The engineered host cells may include one or more inactivating mutations to an enzyme or protein of the cell (such as two or more, three or more, four or more, five or more, or even more). The inclusion of one or more inactivating mutations may modify the flux of a synthetic pathway of an engineered host cell to increase the levels of a BIA of interest or a desirable enzyme or precursor leading to the same. In some examples, the one or more inactivating mutations are to an enzyme native to the cell. Additionally or alternatively, the one or more inactivating mutations are to an enzyme non-native to the cell. As used herein, by “inactivating mutation” is meant one or more mutations to a gene or regulatory DNA sequence of the cell, where the mutation(s) inactivates a biological activity of the protein expressed by that gene of interest. In some cases, the gene is native to the cell. In some instances, the gene encodes an enzyme that is inactivated and is part of or connected to the synthetic pathway of a BIA of interest produced by the host cell. In some instances, an inactivating mutation is located in a regulatory DNA sequence that controls a gene of interest. In certain cases, the inactivating mutation is to a promoter of a gene. Any convenient mutations (e.g., as described herein) may be utilized to inactivate a gene or regulatory DNA sequence of interest. By “inactivated” or “inactivates” is meant that a biological activity of the protein expressed by the mutated gene is reduced by 10% or more, such as by 20% or more, 30% or more, 40% or more, 50% or more, 60% or more, 70% or more, 80% or more, 90% or more, 95% or more, 97% or more, or 99% or more, relative to a control protein expressed by a non-mutated control gene. In some cases, the protein is an enzyme and the inactivating mutation reduces the activity of the enzyme.

[0111] In some examples, the engineered host cell includes an inactivating mutation in an enzyme or protein native to the cell. Any convenient enzymes may be targeted for inactivation. Enzymes of interest may include, but are not limited to those enzymes, described in Table 5 whose action in the synthetic pathway of the engineered host cell tends to reduce the levels of a BIA of interest. In some cases, the enzyme has glucose-6-phosphate dehydrogenase activity. In certain embodiments, the enzyme that includes an inactivating mutation is ZWF1. In some cases, the enzyme has alcohol dehydrogenase activity. In some embodiments, the enzyme that includes an inactivating mutation is selected from ADH2, ADH3, ADH4, ADH5, ADH6, ADH7, and SFA1. In certain embodiments, the enzyme that includes an inactivating mutation(s) is ADH2. In certain embodiments, the enzyme that includes an inactivating mutation(s) is ADH3. In certain embodiments, the enzyme that includes an inactivating mutation(s) is ADH4. In certain embodiments, the enzyme that includes an inactivating mutation(s) is ADH5. In certain embodiments, the enzyme that includes an inactivating mutation(s) is ADH6. In certain embodiments, the enzyme that includes an inactivating mutation(s) is ADH7. In some cases, the enzyme has aldehyde oxidoreductase activity. In certain embodiments, the enzyme that includes an inactivating mutation is selected from ALD2, ALD3, ALD4, ALD5, and ALD6. In certain embodiments, the enzyme that includes an inactivating mutation(s) is ALD2. In certain embodiments, the enzyme that includes an inactivating mutation(s) is ALD3. In certain embodiments, the enzyme that includes an inactivating mutation(s) is ALD4. In certain embodiments, the enzyme that includes an inactivating mutation(s) is ALD5. In certain embodiments, the enzyme that includes an inactivating mutation(s) is ALD6. In some cases, the enzyme has aldehyde reductase activity. In some embodiments, the enzyme that includes an inactivating mutation is ARI1. In some cases, the enzyme has aryl-alcohol dehydrogenase activity. In some embodiments, the enzyme that includes an inactivating mutation is selected from AAD4, AAD6, AAD10, AAD14, AAD15, AAD16. In certain embodiments, the enzyme that includes an inactivating mutation(s) is AAD4. In certain embodiments, the enzyme that includes an inactivating mutation(s) is AAD6. In certain embodiments, the enzyme that includes an inactivating mutation(s) is AAD10. In certain embodiments, the enzyme that includes an inactivating mutation(s) is AAD14. In certain embodiments, the enzyme that includes an inactivating mutation(s) is AAD15. In certain embodiments, the enzyme that includes an inactivating mutation(s) is AAD16. In some examples, the engineered host cell includes an inactivating mutation in a transcription regulator native to the cell. Transcriptional regulators of interest may include, but are not limited to those proteins, described in Table 5. In some cases, the protein has activity as a transcriptional regulator of phospholipid biosynthetic genes. In some embodiments, the transcriptional regulator that includes an inactivating mutation is OPI1. In some embodiments, the host cell includes one or more inactivating mutations to one or more genes described in Table 5.

### Epimerization Modifications

[0112] Some methods, processes, and systems provided herein describe the conversion of (S)-1-benzylisoquinoline alkaloids to (R)-1-benzylisoquinoline alkaloids. Some of these methods, processes, and systems may comprise an engineered host cell. In some examples, the conversion of (S)-1-benzylisoquinoline alkaloids to (R)-1-benzylisoquinoline alkaloids is a key step in the conversion of a substrate to a diverse range of alkaloids. In some examples, the conversion of (S)-1-benzylisoquinoline alkaloids to (R)-1-benzylisoquinoline alkaloids comprises an epimerization reaction via an engineered epimerase. In some cases, epimerization of a substrate alkaloid may be performed by oxidizing an (S)-substrate to the corresponding Schiff base or imine intermediate, then stereospecifically reducing this intermediate to an (R)-product as provided in FIG. 1 and as represented generally in Scheme 1. As provided in Scheme 1, R₁, R₂, R₃, and R₄ may be H or CH₃. R₅ may be H, OH, or OCH₃.

[chemical structure]

[0113] In some examples, the conversion of the (S)-substrate to the (R)-product may involve at least one oxidation reaction and at least one reduction reaction. In some cases, an oxidation reaction is optionally followed by a reduction reaction. In some cases, at least one of the oxidation and reduction reactions is carried out in the presence of an enzyme. In some cases, at least one of the oxidation and reduction reactions is catalyzed by an engineered epimerase. In some cases, the oxidation and reduction reactions are both carried out in the presence of an engineered fused epimerase. In some cases, the oxidation and reduction reactions are both carried out in the presence of an engineered split epimerase having a separately expressed oxidase component and reductase component, respectively. In some cases, an engineered epimerase is useful to catalyze the oxidation and reduction reactions. The oxidation and reduction reactions may be catalyzed by the same engineered epimerase.

[0114] In some methods, processes and systems described herein, an oxidation reaction may be performed in the presence of an enzyme that is part of an engineered epimerase. In some examples, the engineered epimerase may have an oxidase component. In some cases, the oxidase component may be a component of an engineered fused epimerase. In some case, the oxidase component may be independently expressed as part of an engineered split epimerase. The oxidase may use a (S)-1-benzylisoquinoline as a substrate. The oxidase may convert the (S)-substrate to a corresponding imine or Schiff base derivative. The oxidase may be referred to as 1,2-dehydroreticuline synthase (DRS). Non-limiting examples of enzymes suitable for oxidation of (S)-1-benzylisoquinoline alkaloids in this disclosure include a cytochrome P450 oxidase, a 2-oxoglutarate-dependent oxidase, and a flavoprotein oxidase. For example, (S)-tetrahydroprotoberberine oxidase (STOX, E.C 1.3.3.8) may oxidize (S)-norreticuline and other (S)-1-benzylisoquinoline alkaloids to 1,2-dehydronorreticuline and other corresponding 1,2-dehydro products. In some examples, a protein that comprises an oxidase domain of any one of the preceding examples may perform the oxidation. In some examples, the oxidase may catalyze the oxidation reaction within a host cell, such as an engineered host cell, as described herein. In some cases, the oxidase may have one or more activity-increasing components.

[0115] In some examples, a reduction reaction may follow the oxidation reaction. The reduction reaction may be performed by an enzyme that is part of an engineered epimerase. In some examples, the reductase may use an imine or Schiff base derived from a 1-benzylisoquinoline as a substrate. The reductase may convert the imine or Schiff base derivative to a (R)-1-benzylisoquinoline. The reductase may be referred to as 1,2-dehydroreticuline reductase (DRR). Non-limiting examples of enzymes suitable for reduction of an imine or Schiff base derived from an (S)-1-benzylisoquinoline alkaloid include an aldo-keto reductase (e.g., a codeinone reductase-like enzyme (EC 1.1.1.247)) and a short chain dehydrogenase (e.g., a salutaridine reductase-like enzyme (EC 1.1.1.248)). In some examples, a protein that comprises a reductase domain of any one of the preceding examples may perform the reduction. In a further embodiment, the reduction is stereospecific. In some examples, the reductase may catalyze the reduction reaction within a host cell, such as an engineered host cell, as described herein.

[0116] An example of an enzyme that can perform an epimerization reaction that converts (S)-1-benzylisoquinoline alkaloids to (R)-1-benzylisoquinoline alkaloids includes an epimerase having an oxidase domain and a reductase domain. In particular, the epimerase may have a cytochrome P450 oxidase 82Y2-like domain. Additionally, the epimerase may have a codeinone reductase-like domain. An epimerase having a cytochrome P450 oxidase 82Y2-like domain and also having a codeinone reductase-like domain may be referred to as a DRS-DRR enzyme. In particular, a DRS-DRR enzyme may be a fusion enzyme that is a fusion epimerase. Further, when a DRS-DRR enzyme is modified by at least one activity-increasing modification, the fusion enzyme may be an engineered fusion epimerase.

[0117] Examples of amino acid sequences of a DRS-DRR enzyme that may be used to perform the conversion of (S)-1-benzylisoquinoline alkaloids to (R)-1-benzylisoquinoline alkaloids are set forth in Table 1. An amino acid sequence for an epimerase that is utilized in converting an (S)-1-benzylisoquinoline alkaloid to an (R)-1-benzylisoquinoline alkaloid may be 50% or more identical to a given amino acid sequence as listed in Table 1. For example, an amino acid sequence for such an epimerase may comprise an amino acid sequence that is at least 50% or more, 55% or more, 60% or more, 65% or more, 70% or more, 75% or more, 80% or more, 81% or more, 82% or more, 83% or more, 84% or more, 85% or more, 86% or more, 87% or more, 88% or more, 89% or more, 90% or more, 91% or more, 92% or more, 93% or more, 94% or more, 95% or more, 96% or more, 97% or more, 98% or more, or 99% or more identical to an amino acid sequence as provided herein. Additionally, in certain embodiments, an “identical” amino acid sequence contains at least 80%-99% identity at the amino acid level to the specific amino acid sequence. In some cases an “identical” amino acid sequence contains at least about 85%, 86%, 87%, 88%, 89%, 90%, 91%, 92%, 93%, 94% and more in certain cases, at least 95%, 96%, 97%, 98% and 99% identity, at the amino acid level. In some cases, the amino acid sequence may be identical but the DNA sequence is altered such as to optimize codon usage for the host organism, for example.

[0118] Amino acid residues of homologous epimerases may be referenced according to the numbering scheme of SEQ ID NO. 16, and this numbering system is used throughout the disclosure to refer to specific amino acid residues of epimerases which are homologous to SEQ ID NO. 16. Epimerases homologous to SEQ ID NO. 16 may have at least about 50%, 55%, 60%, 65%, 70%, 75%, 80%, 85%, 90%, 95%, 97%, 98%, or 99% sequence identity to SEQ ID NO. 16. In some cases, an amino acid referred to as position 50 in a homologous epimerase may not be the 50^{th} amino acid in the homologous epimerase, but would be the amino acid which corresponds to the amino acid at position 50 in SEQ ID NO. 16 in a protein alignment of the homologous epimerase with SEQ ID NO. 16. In some cases, homologous enzymes may be aligned with SEQ ID NO. 16 either according to primary sequence, secondary structure, or tertiary structure.

[0119] An engineered host cell may be provided that produces an engineered epimerase that converts (S)-1-benzylisoquinoline alkaloid to (R)-1-benzylisoquinoline alkaloid, wherein the epimerase comprises an amino acid sequence selected from the group consisting of: SEQ ID NOs: 1, 2, 3, 4, 5, 6, 7, 8, 9, 10, 11, 12, 13, 14, 15, 16, 17, and 18, and having one or more activity-enhancing modifications. The epimerase that is produced within the engineered host cell may be recovered and purified so as to form a biocatalyst. In some cases, the epimerase may be split into one or more enzymes. Additionally, one or more enzymes that are produced by splitting the epimerase may be recovered from the engineered host cell. These one or more enzymes that result from splitting the epimerase may also be used to catalyze the conversion of (S)-1-benzylisoquinoline alkaloids to (R)-1-benzylisoquinoline alkaloids. Additionally, the use of an engineered split epimerase may be used to increase the production of benzylisoquinoline alkaloid products within a cell when compared to the production of benzylisoquinoline alkaloid products within a cell utilizing a fused epimerase.

[0120] In additional cases, the one or more enzymes that are recovered from the engineered host cell that produces the epimerase may be used in a process for converting a (S)-1-benzylisoquinoline alkaloid to a (R)-1-benzylisoquinoline alkaloid. The process may include contacting the (S)-1-benzylisoquinoline alkaloid with an epimerase in an amount sufficient to convert said (S)-1-benzylisoquinoline alkaloid to (R)-1-benzylisoquinoline alkaloid. In some examples, the (S)-1-benzylisoquinoline alkaloid may be contacted with a sufficient amount of the one or more enzymes such that at least 5% of said (S)-1-benzylisoquinoline alkaloid is converted to (R)-1-benzylisoquinoline alkaloid. In further examples, the (S)-1-benzylisoquinoline alkaloid may be contacted with a sufficient amount of the one or more enzymes such that at least 10%, at least 15%, at least 20%, at least 25%, at least 30%, at least 35%, at least 40%, at least 45%, at least 50%, at least 55%, at least 60%, at least 65%, at least 70%, at least 75%, at least 80%, at least 82%, at least 84%, at least 86%, at least 88%, at least 90%, at least 91%, at least 92%, at least 93%, at least 94%, at least 95%, at least 96%, at least 97%, at least 98%, at least 99%, at least 99.5%, at least 99.7%, or 100% of said (S)-1-benzylisoquinoline alkaloid is converted to (R)-1-benzylisoquinoline alkaloid.

[0121] The one or more enzymes that may be used to convert a (S)-1-benzylisoquinoline alkaloid to a (R)-1-benzylisoquinoline alkaloid may contact the (S)-1-benzylisoquinoline alkaloid in vitro. Additionally, or alternatively, the one or more enzymes that may be used to convert a (S)-1-benzylisoquinoline alkaloid to a (R)-1-benzylisoquinoline alkaloid may contact the (S)-1-benzylisoquinoline alkaloid in vivo. Additionally, the one or more enzymes that may be used to convert a (S)-1-benzylisoquinoline alkaloid to a (R)-1-benzylisoquinoline alkaloid may be provided to a cell having the (S)-1-benzylisoquinoline alkaloid within, or may be produced within an engineered host cell.

[0122] In some examples, the methods provide for engineered host cells that produce an alkaloid product, wherein the epimerization of a (S)-substrate to a (R)-product may comprise a key step in the production of an alkaloid product. In some examples, the alkaloid produced is a (R)-1-benzylisoquinoline alkaloid. In still other embodiments, the alkaloid produced is derived from a (R)-1-benzylisoquinoline alkaloid, including, for example, 4-ring promorphinan and 5-ring morphinan alkaloids. In another embodiment, a (S)-1-benzylisoquinoline alkaloid is an intermediate toward the product of the engineered host cell. In still other embodiments, the alkaloid product is selected from the group consisting of 1-benzylisoquinoline, morphinan, promorphinan, nor-opioid, nal-opioid, or bisbenzylisoquinoline alkaloids.

[0123] In some examples, the (S)-substrate is a (S)-1-benzylisoquinoline alkaloid selected from the group consisting of (S)-norreticuline, (S)-reticuline, (S)-tetrahydropapaverine, (S)-norcoclaurine, (S)-coclaurine, (S)-N-methylcoclaurine, (S)-3′-hydroxy-N-methylcoclaurine, (S)-norisoorientaline, (S)-orientaline, (S)-isoorientaline, (S)-norprotosinomenine, (S)-protosinomenine, (S)-norlaudanosoline, (S)-laudanosoline, (S)-4′-O-methyllaudanosoline, (S)-6-O-methylnorlaudanosoline, (S)-4′-O-methylnorlaudanosoline.

[0124] In some examples, the (S)-substrate is a compound of Formula I:

[chemical structure]

[0125] or a salt thereof, wherein:
[0126] R¹, R², R³, and R⁴ are independently selected from hydrogen and methyl; and
[0127] R⁵ is selected from hydrogen, hydroxy, and methoxy.

[0128] In some other examples, at least one of R¹, R², R³, R⁴, and R⁵ is hydrogen.

[0129] In still other examples, the (S)-substrate is a compound of Formula II:

[chemical structure]

[0130] or a salt thereof, wherein:
[0131] R³ is selected from hydrogen and C₁-C₄ alkyl;
[0132] R⁶ and R⁷ are independently selected at each occurrence from hydroxy, fluoro, chloro, bromo, carboxaldehyde, C₁-C₄ acyl, C₁-C₄ alkyl, and C₁-C₄ alkoxy;
[0133] n is 0, 1, 2, 3, or 4; and
[0134] n′ is 0, 1, 2, 3, 4 or 5.

[0135] When a bond is drawn across a ring, it means substitution may occur at a non-specific ring atom or position. For example, in Formula II shown above, the hydrogen of any —CH— in the 6-membered ring may be replaced with R⁷ to form —CR⁷—.

[0136] In some examples, R⁶ and R⁷ are independently methyl or methoxy. In some other examples, n and n′ are independently 1 or 2. In still other embodiments, R³ is hydrogen or methyl.

[0137] In some examples, the methods provide for engineered host cells that produce alkaloid products from (S)-reticuline. The epimerization of (S)-reticuline to (R)-reticuline may comprise a key step in the production of diverse alkaloid products from a precursor. In some examples, the precursor is L-tyrosine or a sugar (e.g., glucose). The diverse alkaloid products can include, without limitation, 1-benzylisoquinoline, morphinan, promorphinan, nor-opioid, or nal-opioid alkaloids.

[0138] Any suitable carbon source may be used as a precursor toward an epimerized 1-benzylisoquinoline alkaloid. Suitable precursors can include, without limitation, monosaccharides (e.g., glucose, fructose, galactose, xylose), oligosaccharides (e.g., lactose, sucrose, raffinose), polysaccharides (e.g., starch, cellulose), or a combination thereof. In some examples, unpurified mixtures from renewable feedstocks can be used (e.g., cornsteep liquor, sugar beet molasses, barley malt, biomass hydrolysate). In still other embodiments, the carbon precursor can be a one-carbon compound (e.g., methanol, carbon dioxide) or a two-carbon compound (e.g., ethanol). In yet other embodiments, other carbon-containing compounds can be utilized, for example, methylamine, glucosamine, and amino acids (e.g., L-tyrosine). In some examples, a 1-benzylisoquinoline alkaloid may be added directly to an engineered host cell of the invention, including, for example, norlaudanosoline, laudanosoline, norreticuline, and reticuline. In still further embodiments, a 1-benzylisoquinoline alkaloid may be added to the engineered host cell as a single enantiomer (e.g., a (S)-1-benzylisoquinoline alkaloid), or a mixture of enantiomers, including, for example, a racemic mixture.

[0139] In some examples, the methods provide for the epimerization of a stereocenter of a 1-benzylisoquinoline alkaloid, or a derivative thereof, using an engineered epimerase. In a further embodiment, the method comprises contacting the 1-benzylisoquinoline alkaloid with an engineered epimerase. The engineered epimerase may invert the stereochemistry of a stereocenter of a 1-benzylisoquinoline alkaloid, or derivative thereof, to the opposite stereochemistry. In some examples, the engineered epimerase converts a (S)-1-benzylisoquinoline alkaloid to a (R)-1-benzylisoquinoline alkaloid. In some examples of this conversion of a (S)-1-benzylisoquinoline alkaloid to a (R)-1-benzylisoquinoline alkaloid utilizing the engineered epimerase, the (S)-1-benzylisoquinoline alkaloid is selected from the group consisting of (S)-norreticuline, (S)-reticulin, (S)-tetrahydropapaverine, (S)-norcoclaurine, (S)-coclaurine, (S)-N-methylcoclaurine, (S)-3′-hydroxy-N-methylcoclaurine, (S)-norisoorientaline, (S)-orientaline, (S)-isoorientaline, (S)-norprotosinomenine, (S)-protosinomenine, (S)-norlaudanosoline, (S)-laudanosoline, (S)-4′-O-methyllaudanosoline, (S)-6-O-methylnorlaudanosoline, and (S)-4′-O-methylnorlaudanosoline.

[0140] In still other embodiments, the 1-benzylisoquinoline alkaloid that is epimerized using an engineered epimerase may comprise two or more stereocenters, wherein only one of the two or more stereocenters is inverted to produce a diastereomer of the substrate (e.g., (S, R)-1-benzylisoquinoline alkaloid converted to (R, R)-1-benzylisoquinoline alkaloid). In some examples where only one stereocenter of a 1-benzylisoquinoline alkaloid is inverted when contacted with the at least one enzyme, the product is referred to as an epimer of the 1-benzylisoquinoline alkaloid.

[0141] In some examples, the 1-benzylisoquinoline alkaloid is presented to the enzyme as a single stereoisomer. In some other examples, the 1-benzylisoquinoline alkaloid is presented to the enzyme as a mixture of stereoisomers. In still further embodiments, the mixture of stereoisomers may be a racemic mixture. In some other examples, the mixture of stereoisomers may be enriched in one stereoisomer as compared to another stereoisomer.

[0142] In some examples, a 1-benzylisoquinoline alkaloid, or a derivative thereof, is recovered. In some examples, the 1-benzylisoquinoline alkaloid is recovered from a cell culture. In still further embodiments, the recovered 1-benzylisoquinoline alkaloid is enantiomerically enriched in one stereoisomer as compared to the original mixture of 1-benzylisoquinoline alkaloids presented to the enzyme. In still further embodiments, the recovered 1-benzylisoquinoline alkaloid has an enantiomeric excess of at least 50%, at least 55%, at least 60%, at least 65%, at least 70%, at least 75%, at least 80%, at least 82%, at least 84%, at least 86%, at least 88%, at least 90%, at least 91%, at least 92%, at least 93%, at least 94%, at least 95%, at least 96%, at least 97%, at least 98%, at least 99%, at least 99.5%, at least 99.7%, or 100%.

[0143] In some examples, a promorphinan, or a derivative thereof, is recovered. In some examples, the promorphinan is recovered from a cell culture. In still further embodiments, the recovered promorphinan has an enantiomeric excess of at least 50%, at least 55%, at least 60%, at least 65%, at least 70%, at least 75%, at least 80%, at least 82%, at least 84%, at least 86%, at least 88%, at least 90%, at least 91%, at least 92%, at least 93%, at least 94%, at least 95%, at least 96%, at least 97%, at least 98%, at least 99%, at least 99.5%, at least 99.7%, or 100%.

[0144] In some examples, a morphinan, or a derivative thereof, is recovered. In some examples, the morphinan is recovered from a cell culture. In still further embodiments, the recovered morphinan has an enantiomeric excess of at least 50%, at least 55%, at least 60%, at least 65%, at least 70%, at least 75%, at least 80%, at least 82%, at least 84%, at least 86%, at least 88%, at least 90%, at least 91%, at least 92%, at least 93%, at least 94%, at least 95%, at least 96%, at least 97%, at least 98%, at least 99%, at least 99.5%, at least 99.7%, or 100%.

[0145] In some examples, a bisbenzylisoquinoline, or a derivative thereof, is recovered. In some examples, the bisbenzylisoquinoline is recovered from a cell culture. In still further embodiments, the recovered bisbenzylisoquinoline is enantiomerically enriched in one stereoisomer as compared to the original mixture of bisbenzylisoquinoline presented to the enzyme. In still further embodiments, the recovered bisbenzylisoquinoline has an enantiomeric excess of at least 50%, at least 55%, at least 60%, at least 65%, at least 70%, at least 75%, at least 80%, at least 82%, at least 84%, at least 86%, at least 88%, at least 90%, at least 91%, at least 92%, at least 93%, at least 94%, at least 95%, at least 96%, at least 97%, at least 98%, at least 99%, at least 99.5%, at least 99.7%, or 100%.

[0146] In some examples, a nal-opioid, or a derivative thereof, is recovered. In some examples, the nal-opioid is recovered from a cell culture. In still further embodiments, the recovered nal-opioid has an enantiomeric excess of at least 50%, at least 55%, at least 60%, at least 65%, at least 70%, at least 75%, at least 80%, at least 82%, at least 84%, at least 86%, at least 88%, at least 90%, at least 91%, at least 92%, at least 93%, at least 94%, at least 95%, at least 96%, at least 97%, at least 98%, at least 99%, at least 99.5%, at least 99.7%, or 100%.

[0147] In some examples, a nor-opioid, or a derivative thereof, is recovered. In some examples, the nor-opioid is recovered from a cell culture. In still further embodiments, the recovered nor-opioid has an enantiomeric excess of at least 50%, at least 55%, at least 60%, at least 65%, at least 70%, at least 75%, at least 80%, at least 82%, at least 84%, at least 86%, at least 88%, at least 90%, at least 91%, at least 92%, at least 93%, at least 94%, at least 95%, at least 96%, at least 97%, at least 98%, at least 99%, at least 99.5%, at least 99.7%, or 100%.

[0148] “Isomers” are different compounds that have the same molecular formula. “Stereoisomers” are isomers that differ only in the way the atoms are arranged in space. “Enantiomers” are a pair of stereoisomers that are non superimposable mirror images of each other. A 1:1 mixture of a pair of enantiomers is a “racemic” mixture. “Diastereoisomers” or “diastereomers” are stereoisomers that have at least two asymmetric atoms but are not mirror images of each other. The term “epimer” as used herein refers to a compound having the identical chemical formula but a different optical configuration at a particular position. For example, the (R,S) and (S,S) stereoisomers of a compound are epimers of one another. In some examples, a 1-benzylisoquinoline alkaloid is converted to its epimer (e.g., epi-1-benzylisoquinoline alkaloid). The absolute stereochemistry is specified according to the Cahn-Ingold-Prelog R-S system. When a compound is a pure enantiomer, the stereochemistry at each chiral carbon can be specified by either R or S. Resolved compounds whose absolute configuration is unknown can be designated (+) or (−) depending on the direction (dextro- or levorotatory) in which they rotate plane polarized light at the wavelength of the sodium D line. Certain compounds described herein contain one or more asymmetric centers and can thus give rise to enantiomers, diastereomers, and other stereoisomeric forms that can be defined, in terms of absolute stereochemistry, as (R)- or (S)-.

TABLE 1
Example amino acid sequences of DRS-DRR enzymes, split
DRS and DRR enzymes, and other nucleotide sequences

| | | SEQ. ID |
|---|---|---|
| Sequence | Description | NO. |
| MELQYISYFQPTSSVVALLLALVSILSSVVVLRKTFLNNYSSSPAS | P. somniferum | SEQ. ID |
| STKTAVLSHQRQQSCALPISGLLHIFMNKNGLIHVTLGNMADKYGP | plant source; | NO. 1 |
| IFSFPTGSHRTLVVSSWEMVKECFTGNNDTAFSNRPIPLAFKTIFY | full-length | |
| ACGGIDSYGLSSVPYGKYWRELRKVCVHNLLSNQQLLKFRHLIISQ | amino acid | |
| VDTSFNKLYELCKNSEDNHGNYTTTTTTAAGMVRIDDWLAELSFNV | sequence | |
| IGRIVCGFQSGPKTGAPSRVEQFKEAINEASYFMSTSPVSDNVPML | >RQNK- | |
| GWIDQLTGLTRNMKHCGKKLDLVVESIINDHRQKRRFSRTKGGDEK | 2062398 | |
| DDEQDDFIDICLSIMEQPQLPGNNNPSQIPIKSIVLDMIGGGTDTT | (also FPYZ- | |
| KLTTIWTLSLLLNNPHVLDKAKQEVDAHFRTKRRSTNDAAAAVVDF | 2037562, | |
| DDIRNLVYIQAIIKESMRLYPASPVVERLSGEDCVVGGFHVPAGTR | BMRX- | |
| LWANVWKMQRDPKVWDDPLVFRPDRFLSDEQKMVDVRGQNYELLPF | 2007040, and | |
| GAGRRVCPGVSFSLDLMQLVLTRLILEFEMKSPSGKVDMTATPGLM | MLPX- | |
| SYKVIPLDILLTHRRIKPCVQSAASERDMESSGVPVITLGSGKVMP | 2016197) | |
| VLGMGTFEKVGKGSERERLAILKAIEVGYRYFDTAAAYETEEVLGE | | |
| AIAEALQLGLVKSRDELFISSMLWCTDAHADRVLLALQNSLRNLKL | | |
| EYVDLYMLPFPASLKPGKITMDIPEEDICRMDYRSVWAAMEECQNL | | |
| GFTKSIGVSNFSCKKLQELMATANIPPAVNQVEMSPAFQQKKLREY | | |
| CNANNILVSAISVLGSNGTPWGSNAVLGSEVLKKIAMAKGKSVAQV | | |
| SMRWVYEQGASLVVKSFSEERLRENLNIFDWELTKEDHEKIGEIPQ | | |
| CRILSAYFLVSPNGPFKSQEELWDDEA* | | |
| MELQYISYFQPTSSVVALLLALVSILSSVVVLRKTFLNNYSSSPAS | P. somniferum | SEQ. ID |
| STKTAVLSHQRQQSCALPISGLLHIFMNKNGLIHVTLGNMADKYGP | plant source; | NO. 2 |
| IFSFPTGSHRTLVVSSWEMVKECFTGNNDTAFSNRPIPLAFKTIFY | full-length | |
| ACGGIDSYGLSSVPYGKYWRELRKVCVHNLLSNQQLLKFRHLIISQ | amino acid | |
| VDTSFNKLYELCKNSEDNHGNYTTXLLLPQLAWRQPWKLYYXTTTT | sequence | |
| AAGMVRIDDWLAELSFNVIGRIVCGFQSGPKTGAPSRVEQFKEAIN | >KKCW- | |
| EASYFMSTSPVSDNVPMLGWIDQLTGLTRNMKHCGKKLDLVVESII | 2026866 | |
| NDHRQKRRFSRTKGGDEKDDEQDDFIDICLSIMEQPQLPGNNNPSQ | (also FPYZ- | |
| IPIKSIVLDMIGGGTDTTKLTTIWTLSLLLNNPHVLDKAKQEVDAH | 2037562, | |
| FRTKRRSTNDAAAAVVDFDDIRNLVYIQAIIKESMRLYPASPVVER | MLPX-2016197 | |
| LSGEDCVVGGFHVPAGTRLWANVWKMQRDPKVWDDPLVFRPDRFLS | | |
| DEQKMVDVRGQNYELLPFGAGRRVCPGVSFSLDLMQLVLTRLILEF | | |
| EMKSPSGKVDMTATPGLMSYKVIPLDILLTHRRIKPCVQSAASERD | | |
| MESSGVPVITLGSGKVMPVLGMGTFEKVGKGSERERLAILKAIEVG | | |
| YRYFDTAAAYETEEVLGEAIAEALQLGLVKSRDELFISSMLWCTDA | | |
| HADRVLLALQNSLRNLKLEYVDLYMLPFPASLKPGKITMDIPEEDI | | |
| CRMDYRSVWAAMEECQNLGFTKSIGVSNFSCKKLQELMATANIPPA | | |
| VNQVEMSPAFQQKKLREYCNANNILVSAISVLGSNGTPWGSNAVLG | | |
| SEVLKKIAMAKGKSVAQVSMRWVYEQGASLVVKSFSEERLRENLNI | | |
| FDWELTKEDHEKIGEIPQCRILSAYFLVSPNGPFKSQEELWDDEA* | | |
| MELQYISYFQPTSSVVALLLALVSILSSVVVLRKTFLNNYSSSPAS | P. somniferum | SEQ. ID |
| STKTAVLSHQRQQSCALPISGLLHIFMNKNGLIHVTLGNMADKYGP | plant source; | NO. 3 |
| IFSFPTGSHRTLVVSSWEMVKECFTGNNDTAFSNRPIPLAFKTIFY | partial-length | |
| ACGGIDSYGLSSVPYGKYWRELRKVCVHNLLSNQQLLKFRHLIISQ | amino acid | |
| VDTSFNKLYELCKNSEDNHGNYTTTTTTAAGMVRIDDWLAELSFNV | sequence | |
| IGRIVCGFQSGPKTGAPSRVEQFKEAINEASYFMSTSPVSDNVPML | >SUFP- | |
| GWIDQLTGLTRNMKHCGKKLDLVVESIINDHRQKRRFSRTKGGDEK | 2025636 | |
| DDEQDDFIDICLSIMEQPQLPGNNNPSQIPIKSIVLDMIGGGTDTT | | |
| KLTTIWTLSLLLNNPHVLDKAKQEVDAHFRTKRRSTNDAAAAVVDF | | |
| DDIRNLVYIQAIIKESMRLYPASPVVERLSGEDCVVGGFHVPAGTR | | |
| LWANVWKMQRDPKVWDDPLVFRPDRFLSDEQKMVDVRGQNYELLPF | | |
| GAGRRVCPGVSFSLDLMQLVLTRLILEFEMKSPSGKVDMTATPGLM | | |
| SYKVIPLDILLTHRRIKPCVQSAASERDMESSGVPVITLGSGKVMP | | |
| VLGMGTFEKVGKGSERERLAILKAIEVGYRYFDTAAAYETEEVLGE | | |
| AIAEALQLGLVKSRDELFISSMLWCTDAHADRVLLALQNSLRNLKL | | |
| EYVDLYMLPFPASLKPGKITMDIPEEDICRMDYRXVSKPWLH* | | |
| MRWHRXIDSYGLSSVPYGKYWRELRKVCVHNLLSNQQLLKFRHLII | P. somniferum | SEQ. ID |
| SQVDTSFNKLYELCKNSEDNQGNYPTTTTAAGMVRIDDWLAELSFN | plant source; | NO. 4 |
| VIGRIVCGFQSGPKTGAPSRVEQFKEAINEASYFMSTSPVSDNVPM | partial-length | |
| LGWIDQLTGLTRNMKHCGKKLDLVVESIINDHRQKRRFSRTKGGDE | amino acid | |
| KDDEQDDFIDICLSIMEQPQLPGNNNPSQIPIKSIVLDMIGGGTDT | sequence | |
| TKLTTIWTLSLLLNNPHVLDKAKQEVDAHFRTKRRSTNDAAAAVVD | >MIKW- | |
| FDDIRNLVYIQAIIKESMRLYPASPVVERLSGEDCVVGGFHVPAGT | 2013651 | |
| RLWANVWKMQRDPKVWDDPLVFRPDRFLSDEQKMVDVRGQNYELLP | | |
| FGAGRRVCPGVSFSLDLMQLVLTRLILEFEMKSPSGKVDMTATPGL | | |
| MSYKVIPLDILLTHRRIKPCVQSAASERDMESSGVPVITLGSGKVM | | |
| PVLGMGTFEKVGKGSERERLAILKAIEVGYRYFDTAAAYETEEVLG | | |
| EAIAEALQLGLVKSRDELFISSMLWCTDAHADRVLLALQNSLRNLK | | |
| LEYVDLYMLPFPASLKPGKITMDIPEEDICRMDYRSVWAAMEECQN | | |
| LGFTKSIGVSNFSCKKLQELMATANIPPAVNQVEMSPAFQQKKLRE | | |
| YCNANNILVSAISVLGSNGTPWGSNAVLGSEVLKKIAMAKGKSVAQ | | |
| VSMRWVYEQGASLVVKSFSEERLRENLNIFDWELTKEDHEKIGEIP | | |
| QCRILSAYFLVSPNGPFKSQEELWDDEA* | | |
| MELQYISYFQPTSSVVALLLALVSILSSVVVLRKTFLNNYSSSPAS | P. setigerum | SEQ. ID |
| STKTAVLSHQRQQSCALPISGLLHIFMNKNGLIHVTLGNMADKYGP | plant source; | NO. 5 |
| IFSFPTGSHRTLVVSSWEMVKECFTGNNDTAFSNRPIPLAFKTIFY | full-length | |
| ACGGIDSYGLSSVPYGKYWRELRKVCVHNLLSNQQLLKFRHLIISQ | amino acid | |
| VDTSFNKLYELCKNSEDNQGNYTTTTTAAGMVRIDDWLAELSFNVI | sequence | |
| GRIVCGFQSGPKTGAPSRVEQFKEAINEASYFMSTSPVSDNVPMLG | >EPRK- | |
| WIDQLTGLTRNMKHCGKKLDLVVESIINDHRQKRRFSRTKGGDEKD | 2027940 | |
| DEQDDFIDICLSIMEQPQLPGNNNPSQIPIKSIVLDMIGGGTDTTK | (also FPYZ- | |
| LTTIWTLSLLLNNPHVLDKAKQEVDAHFRTKRRSTNDAAAAVVDFD | 2037562, | |
| DIRNLVYIQAIIKESMRLYPASPVVERLSGEDCVVGGFHVPAGTRL | STDO- | |
| WANVWKMQRDPKVWDDPLVFRPDRFLSDEQKMVDVRGQNYELLPFG | 2019715, | |
| AGRRVCPGVSFSLDLMQLVLTRLILEFEMKSPSGKVDMTATPGLMS | FNXH- | |
| YKVIPLDILLTHRRIKPCVQSAASERDMESSGVPVITLGSGKVMPV | 2029312, | |
| LGMGTFEKVGKGSERERLAILKAIEVGYRYFDTAAAYETEEVLGEA | MLPX- | |
| IAEALQLGLVKSRDELFISSMLWCTDAHADRVLLALQNSLRNLKLE | 2016196 | |
| YVDLYMLPFPASLKPGKITMDIPEEDICRMDYRSVWAAMEECQNLG | MLPX- | |
| FTKSIGVSNFSCKKLQELMATANIPPAVNQVEMSPAFQQKKLREYC | 2016197) | |
| NANNILVSAISVLGSNGTPWGSNAVLGSEVLKKIAMAKGKSVAQVS | | |
| MRWVYEQGASLVVKSFSEERLRENLNIFDWELTKEDHEKIGEIPQC | | |
| RILSAYFLVSPNGPFKSQEELWDDEA* | | |
| MELQYISYFQPTSSVVALLLALVSILSSVVVLRKTFLNNYSSSPAS | P. setigerum | SEQ. ID |
| STKTAVLSHQRQQSCALPISGLLHIFMNKNGLIHVTLGNMADKYGP | plant source; | NO. 6 |
| IFSFPTGSHRTLVVSSWEMVKECFTGNNDTAFSNRPIPLAFKTIFY | partial-length | |
| ACGGIDSYGLSSVPYGKYWRELRKVCVHNLLSNQQLLKFRHLIISQ | amino acid | |
| VDTSFNKLYELCKNSEDNQGNYTTTTTAAGMVRIDDWLAELSFNVI | sequence | |
| GRIVCGFQSGPKTGAPSRVEQFKEAINEASYFMSTSPVSDNVPMLG | >QCOU- | |
| WIDQLTGLTRNMKHCGKKLDLVVESIINDHRQKRRFSRTKGGDEKD | 2000833 | |
| DEQDDFIDICLSIMEQPQLPGNNNPSQIPIKSIVLDMIGGGTDTTK | | |
| LTTIWTLSLLLNNPHVLDKAKQEVDAHFRTKRRSTNDAAAAVVDFD | | |
| DIRNLVYIQALYPASPVVERLSGEDCVVGGFHVPAGTRLWANVWKM | | |
| QRDPKVWDDPLVFRPDRFLSDEQKMVDVRGQNYELLPFGAGRRVCP | | |
| GVSFSLDLMQLVLTRLILEFEMKSPSGKVDMTATPGLMSYKVIPLD | | |
| ILLTHRRIKPCVQSAASERDMESSGVPVITLGSGKVMPVLGMGTFE | | |
| KVGKGSERERLAILKAIEVGYRYFDTAAAYETEEVLGEAIAEALQL | | |
| GLVKSRDELFISSMLWCTDAHADRVLLALQNSLRNLKLEYVDLYML | | |
| PFPASLKPGKITMDIPEEDICRMDYRSVWAAMEE | | |
| MELQYFSYFQPTSSVVALLLALVSILFSVVVLRKTFSNNYSSPASS | P. bracteatum | SEQ. ID |
| TETAVLCHQRQQSCALPISGLLHVFMNKNGLIHVTLGNMADKYGPI | plant source; | NO. 7 |
| FSFPTGSHRTLVVSSWEMVKECFTGNNDTAFSNRPIPLAFQTIFYA | full-length | |
| CGGIDSYGLSSVPYGKYWRELRKVCVHNLLSNQQLLKFRHLIISQV | amino acid | |
| DTSFNKLYELCKNSEDNQGMVRMDDWLAQLSFNVIGRIVCGFQSDP | sequence | |
| KTGAPSRVEQFKEVINEASYFMSTSPVSDNVPMLGWIDQLTGLTRN | >SSDU- | |
| MKHCGKKLDLVVESIIKDHRQKRRFSRTKGGDEKDDEQDDFIDICL | 2015634 | |
| SIMEQPQLPGNNSPPQIPIKSIVLDMIGGGTDTTKLTTIWTLSLLL | (also SSDU- | |
| NNPHVLDKAKQEVDAHFRKKRRSTDDAAAAVVDFDDIRNLVYIQAI | 2015636, | |
| IKESMRLYPASPVVERLSGEDCVVGGFHVPAGTRLWANVWKMQRDP | ZSNV- | |
| KVWDDPLVFRPERFLSDEQKMVDVRGQNYELLPFGAGRRICPGVSF | 2027701, | |
| SLDLMQLVLTRLILEFEMKSPSGKVDMTATPGLMSYKVVPLDILLT | RRID- | |
| HRRIKSCVQLASSERDMESSGVPVITLSSGKVMPVLGMGTFEKVGK | 2004435) | |
| GSERERLAILKAIEVGYRYFDTAAAYETEEVLGEAIAEALQLGLIE | | |
| SRDELFISSMLWCTDAHPDRVLLALQNSLRNLKLEYLDLYMLPFPA | | |
| SLKPGKITMDIPEEDICRMDYRSVWSAMEECQNLGFTKSIGVSNFS | | |
| SKKLQELMATANIPPAVNQVEMSPAFQQKKLREYCNANNILVSAVS | | |
| ILGSNGTPWGSNAVLGSEVLKQIAMAKGKSVAQVSMRWVYEQGASL | | |
| VVKSFSEERLRENLNIFDWELTKEDNEKIGEIPQCRILTAYFLVSP | | |
| NGPFKSQEELWDDKA* | | |
| MELQYFSYFQPTSSVVALLLALVSILFSVVVLRKTFSNNYSSPASS | P. bracteatum | SEQ. ID |
| TETAVLCHQRQQSCALPISGLLHVFMNKNGLIHVTLGNMADKYGPI | plant source; | NO. 8 |
| FSFPTGSHRTLVVSSWEMVKECFTGNNDTAFSNRPIPLAFQTIFYA | full-length | |
| CGGIDSYGLSSVPYGKYWRELRKVCVHNLLSNQQLLKFRHLIISQV | amino acid | |
| DTSFNKLYELCKNSEDNQGMVRMDDWLAQLSFNVIGRIVCGFQSDP | sequence | |
| KTGAPSRVEQFKEVINEASYFMSTSPVSDNVPMLGWIDQLTGLTRN | >TMWO- | |
| MKHCGKKLDLVVESIIKDHRQKRRFSRTKGGDEKDDEQDDFIDICL | 2027322 | |
| SIMEQPQLPGNNSPPQIPIKSIVLDMIGGGTDTTKLTTIWTLSLLL | (also RRID- | |
| NNPHVLDKAKQEVDAHFRKKRRSTDDAAAAVVDFDDIRNLVYIQAI | 2004435) | |
| IKESMRLYPASPVVERLSGEDCVVGGFHVPAGTRLWANVWKMQRDP | | |
| KVWDDPLVFRPERFLSDEQKMVDVRGQNYELLPFGAGRRICPGVSF | | |
| SLDLMQLVLTRLILEFEMKSPSGKVDMTATPGLMSYKVVPLDILLT | | |
| HRRIKSCVQLASSERDMESSGVPVITLSSGKVMPVLGMGTFEKVGK | | |
| GSERERLAILKAIEVGYRYFDTAAAYETEEVLGEAIAEALQLGLIE | | |
| SRDELFISSMLWCTDAHPDRVLLALQNSLRNLKLEYLDLYMLPFPA | | |
| SLKPGKITMDIPEEDICRMDYRSVWSAMEECQNLGFTKSIGVSNFS | | |
| CKKLQELMATANIPPAVNQVEMSPAFQQKKLREYCNANNILVSAVS | | |
| ILGSNGTPWGSNAVLGSEVLKQIAMAKGKSVAQVSMRWVYEQGASL | | |
| VVKSFSEERLRENLNIFDWELTKEDNEKIGEIPQCRILTAYFLVSP | | |
| NGPFKSQEELWDDKA* | | |
| SSPASSTETAVLCHQRQQSCALPISGLLHIFMNKNGLIHVTLGNMA | P. bracteatum | SEQ. ID |
| DKYGPIFSFPTGSHRILVVSSWEMVKECFTGNNDTAFSNRPIPLAF | plant source; | NO. 9 |
| KTIFYACRGIDSYGLSSVPYGKYWRELRKVCVHNLLSNQQLLKFRH | partial-length | |
| LIISQVDTSFNKLYELCKNSEDNQGMVRMDDWLAQLSFSVIGRIVC | amino acid | |
| GFQSDPKTGAPSRVEQFKEAINEASYFMSTSPVSDNVPMLGWIDQL | sequence | |
| TGLTRNMTHCGKKLDLVVESIINDHRQKRRFSRTKGGDEKDDEQDD | >pbr. | |
| FIDICLSIMEQPQLPGNNNPPKIPIKSIVLDMIGAGTDTTKLTIIW | PBRST1PF_89405 | |
| TLSLLLNNPNVLAKAKQEVDAHFETKKRSTNEASVVVDFDDIGNLV | | |
| YIQAIIKESMRLYPVSPVVERLSSEDCVVGGFHVPAGTRLWANVWK | | |
| MQRDPKVWDDPLVFRPERFLSDEQKMVDVRGQNYELLPFGAGRRIC | | |
| PGVSFSLDLMQLVLTRLILEFEMKSPSGKVDMTATPGLMSYKVVPL | | |
| DILLTHRRIKSCVQLASSERDMESSGVPVITLRSGKVMPVLGMGTF | | |
| EKAGKGSERERLAILKAIEVGYRYFDTAAAYETEEVLGEAIAEALQ | | |
| LGLIKSRDELFISSMLWCTDAHPDRVLLALQNSLRNLKLEYVDLYM | | |
| LPFPASLKPGKITMDIPEEDICPMDYRSVWSAMEECQNLGLTKSIG | | |
| VSNFSCKKLEELMATANIPPAVNQVEMSPAFQQKKLREYCNANNIL | | |
| VSAVSILGSNGTPWGSNAVLGSEVLKKIAMAKGKSVAQVSMRWVYE | | |
| QGASLVVKSFSEERLRENLNIFDWQLTKEDNEKIGEIPQCRILSAY | | |
| FLVSPKGPFKSQEELWDDKA* | | |
| SSPASSTETAVLCHQRQQSCALPISGLLHIFMNKNGLIHVTLGNMA | P. bracteatum | SEQ. ID |
| DKYGPIFSFPTGSHRILVVSSWEMVKECFTGNNDTFFSNRPIPLAF | plant source; | NO. 10 |
| KIIFYAGGVDSYGLALVPYGKYWRELRKICVHNLLSNQQLLKFRHL | partial-length | |
| IISQVDTSFNKLYELCKNSEDNQGMVRMDDWLAQLSFSVIGRIVCG | amino acid | |
| FQSDPKTGAPSRVEQFKEAINEASYFMSTSPVSDNVPMLGWIDQLT | sequence | |
| GLTRNMTHCGKKLDLVVESIINDHRQKRRFSRTKGGDEKDDEQDDF | >pbr. | |
| IDICLSIMEQPQLPGNNNPPKIPIKSIVLDMIGGGTDTTKLTTIWT | PBRST1PF_4328 | |
| LSLLLNNPHVLDKAKQEVDAHFLTKRRSTNDAAVVDFDDIRNLVYI | | |
| QAIIKESMRLYPASPVVERLSGEDCVVGGFHVPAGTRLWVNVWKMQ | | |
| RDPNVWADPMVFRPERFLSHGQKKMVDVRGKNYELLPFGAGRRICP | | |
| GISFSLDLMQLVLTRLILEFEMKSPSGKVDMTATPGLMSYKVVPLD | | |
| ILLTHRRIKSCVQLASSERDMESSGVPVITLRSGKVMPVLGMGTFE | | |
| KAGKGSERERLAILKAIEVGYRYFDTAAAYETEEVLGEAIAEALQL | | |
| GLIKSRDELFISSMLWCTDAHPDRVLLALQNSLRNLKLEYVDLYML | | |
| PFPASLKPGKITMDIPEEDICPMDYRSVWSAMEECQNLGLTKSIGV | | |
| SNFSCKKLEELMATANIPPAVNQVEMSPAFQQKKLREYCNANNILV | | |
| SAVSILGSNGTPWGSNAVLGSEVLKKIAMAKGKSVAQVSMRWVYEQ | | |
| GASLVVKSFSEERLRENLNIFDWQLTKEDNEKIGEIPQCRILSAYF | | |
| LVSPKGPFKSQEELWDDKA* | | |
| SSPASSTETAVLCHQRQQSCALPISGLLHIFMNKNGLIHVTLGNMA | P. bracteatum | SEQ. ID |
| DKYGPIFSFPTGSHRILVVSSWEMVKECFTGNNDTFFSNRPIPLAF | plant source; | NO. 11 |
| KIIFYAGGVDSYGLALVPYGKYWRELRKICVHNLLSNQQLLNFRHL | partial-length | |
| IISQVDTSFNKLYDLSNKKKNTTTDSGTVRMDDWLAQLSFNVIGRI | amino acid | |
| VCGFQTHTETSATSSVERFTEAIDEASRFMSIATVSDTFPWLGWID | sequence | |
| QLTGLTRKMKHYGKKLDLVVESIIEDHRQNRRISGTKQGDDFIDIC | >pbr. | |
| LSIMEQPQIIPGNNDPPRQIPIKSIVLDMIGGGTDTTKLTTTWTLS | PBRST1PF_12180 | |
| LLLNNPHVLEKAREEVDAHFGTKRRPTNDDAVMVEFDDIRNLVYIQ | | |
| AIIKESMRLYPASPVVERLSGEDCVVGGFHVPAGTRLWVNVWKMQR | | |
| DPNVWADPMVFRPERFLSDEQKMVDVRGQNYELLPFGAGRRICPGV | | |
| SFSLDLMQLVLTRLILEFEMKSPSGKVDMTATPGLMSYKVVPLDIL | | |
| LTHRRIKSCVQLASSERDMESSGVPVITLRSGKVMPVLGMGTFEKA | | |
| GKGSERERLAILKAIEVGYRYFDTAAAYETEEVLGEAIAEALQLGL | | |
| IKSRDELFISSMLWCTDAHPDRVLLALQNSLRNLKLEYVDLYMLPF | | |
| PASLKPGKITMDIPEEDICPMDYRSVWSAMEECQNLGLTKSIGVSN | | |
| FSCKKLEELMATANIPPAVNQVEMSPAFQQKKLREYCNANNILVSA | | |
| VSILGSNGTPWGSNAVLGSEVLKKIAMAKGKSVAQVSMRWVYEQGA | | |
| SLVVKSFSEERLRENLNIFDWQLTKEDNEKIGEIPQCRILSAYFLV | | |
| SPKGPFKSQEELWDDKA* | | |
| VALRKKILKNYYSSSSSTATAVSHQWPKASRALPLIDLLHVFFNKT | P. bracteatum | SEQ. ID |
| DLMHVTLGNMADKFGPIFSFPTGSHRTLVVSSWEKAKECFTGNNDI | plant source; | NO. 12 |
| VFSGRPLPLAFKLIFYAGGIDSYGISQVPYGKKWRELRNICVHNIL | partial-length | |
| SNQQLLKFRHLMISQVDNSFNKLYEVCNSNKDEGDSATSTTAAGIV | amino acid | |
| RMDDWLGKLAFDVIARIVCGFQSQTETSTTSSMERFTEAMDEASRF | sequence | |
| MSVTAVSDTVPWLGWIDQLTGLKRNMKHCGKKLNLVVKSIIEDHRQ | >pbr. | |
| KRRLSSTKKGDENIIDEDEQDDFIDICLSIMEQPQLPGNNNPPKIP | PBRST1PF_4329 | |
| IKSIVLDMIGGGTDTTKLTTIWTLSLLLNNPHVLDKAKQEVDAHFL | | |
| TKRRSTNDAAVVDFDDIRNLVYIQAIIKESMRLYPASPVVERLSGE | | |
| DCVVGGFHVPAGTRLWVNVWKMQRDPNVWADPMVFRPERFLSDEQK | | |
| MVDVRGQNYELLPFGAGRRICPGVSFSLDLMQLVLTRLILEFEMKS | | |
| PSGKVDMTATPGLMSYKVVPLDILLTHRRIKSCVQLASSERDMESS | | |
| GVPVITLRSGKVMPVLGMGTFEKAGKGSERERLAILKAIEVGYRYF | | |
| DTAAAYETEEVLGEAIAEALQLGLIKSRDELFISSMLWCTDAHPDR | | |
| VLLALQNSLRNLKLEYVDLYMLPFPASLKPGKITMDIPEEDICPMD | | |
| YRSVWSAMEECQNLGLTKSIGVSNFSCKKLEELMATANIPPAVNQV | | |
| EMSPAFQQKKLREYCNANNILVSAVSILGSNGTPWGSNAVLGSEVL | | |
| KKIAMAKGKSVAQVSMRWVYEQGASLVVKSFSEERLRENLNIFDWQ | | |
| LTKEDNEKIGEIPQCRILSAYFLVSPKGPFKSQEELWDDKA* | | |
| MELQYFSYFQPTSSVVALLLALVSILFSVVVLRKTFSNNYSSPASS | P. bracteatum | SEQ. ID |
| TETAVLCHQRQQSCALPISGLLHVFMNKNGLIHVTLGNMADKYGPI | plant source; | NO. 13 |
| FSFPTGSHRTLVVSSWEMVKECFTGNNDTAFSNRPIPLAFQTIFYA | partial-length | |
| CGGIDSYGLSSVPYGKYWRELRKVCVHNLLSNQQLLKFRHLIISQV | amino acid | |
| DTSFNKLYELCKNSEDNQGMVRMDDWLAQLSFNVIGRIVCGFQSDP | sequence | |
| KTGAPSRVEQFKEVINEASYFMSTSPVSDNVPMLGWIDQLTGLTRN | >SSDU- | |
| MKHCGKKLDLVVESIIKDHRQKRRFSRTKGGDEKDDEQDDFIDICL | 2015635 | |
| SIMEQPQLPGNNSPPQIPIKSIVLDMIGGGTDTTKLTTIWTLSLLL | | |
| NNPHVLDKAKQEVDAHFRKKRRSTDDAAAAVVDFDDIRNLVYIQAI | | |
| IKESMRLYPASPVVERLSGEDCVVGGFHVPAGTRLWANVWKMQRDP | | |
| KVWDDPLVFRPERFLSDEQKMVDVRGQNYELLPFGAGRRICPGVSF | | |
| SLDLMQLVLTRLILEFEMKSPSGKVDMTATPGLMSYKVVPLDILLT | | |
| HRRIKSCVQLASSERDMESSGVPVITLSSGKVMPVLGMGTFEKVGK | | |
| GSERERLAILKAIEVGYRYFDTAAAYETEEVLGEAIAEALQLGLIE | | |
| SRDELFISSMLWCTDAHPDRVLLALQNSLRNLKLEYLDLYMLPFPA | | |
| SLKPGKITMDIPEEDICRMDYRSVWSAMEECQNLGFTKSIGVSNFS | | |
| SKKLQELMATANIPPAVNQVEMSPAFQQKKLREYCNANNILVSAVS | | |
| ILGSNGTPWGSNAVLGSEVLKQIAMAKGKSVAQVSMRWVXKFSAYA | | |
| IVWSLFFGHRICITLYSFLIRNVAYICITY* | | |
| MELQYFSYFQPTSSVVALLLALVSILFSVVVLRKTFSNNYSSPASS | P. bracteatum | SEQ. ID |
| TETAVLCHQRQQSCALPISGLLHVFMNKNGLIHVTLGNMADKYGPI | plant source; | NO. 14 |
| FSFPTGSHRTLVVSSWEMVKECFTGNNDTAFSNRPIPLAFQTIFYA | partial-length | |
| CGGIDSYGLSSVPYGKYWRELRKVCVHNLLSNQQLLKFRHLIISQV | amino acid | |
| DTSFNKLYELCKNSEDNQGMVRMDDWLAQLSFNVIGRIVCGFQSDP | sequence | |
| KTGAPSRVEQFKEVINEASYFMSTSPVSDNVPMLGWIDQLTGLTRN | >SSDU- | |
| MKHCGKKLDLVVESIIKDHRQKRRFSRTKGGDEKDDEQDDFIDICL | 2015637 | |
| SIMEQPQLPGNNSPPQIPIKSIVLDMIGGGTDTTKLTTIWTLSLLL | | |
| NNPHVLDKAKQEVDAHFRKKRRSTDDAAAAVVDFDDIRNLVYIQAI | | |
| IKESMRLYPASPVVERLSGEDCVVGGFHVPAGTRLWANVWKMQRDP | | |
| KVWDDPLVFRPERFLSDEQKMVDVRGQNYELLPFGAGRRICPGVSF | | |
| SLDLMQLVLTRLILEFEMKSPSGKVDMTATPGLMSYKVVPLDILLT | | |
| HRRIKSCVQLASSERDMESSGVPVITLSSGKVMPVLGMGTFEKVGK | | |
| GSERERLAILKAIEVGYRYFDTAAAYETEEVLGEAIAEALQLGLIE | | |
| SRDELFISSMLWCTDAHPDRVLLALQNSLRQVFLMQIRLIYICTYQ | | |
| QVHLNIYFQINEFVLCDMYRNLKLEY | | |
| LNNYSSSPASSTKTAVLSHQRQQSCALPISGLLHIFMNKNGLIHVT | C. majus plant | SEQ. ID |
| LGNMADKYGPIFSFPTGSHRTLVVSSWEMVKECFTGNNDTAFSNRP | source; | NO. 15 |
| IPLAFKTIFYACGGIDSYGLSSVPYGKYWRELRKVCVHNLLSNQQL | partial- | |
| LKFRHLIISQVDTSFNKLYELCKNSEDNQGNYPTTTTAAGMVRIDD | length amino | |
| WLAELSFNVIGRIVCGFQSGPKTGAPSRVEQFKEAINEASYFMSTS | acid sequence | |
| PVSDNVPMLGWIDQLTGLTRNMKHCGKKLDLVVESIINDHRQKRRF | >chm. | |
| SRTKGGDEKDDEQDDFIDICLSIMEQPQLPGNNNPSQIPIKSIVLD | CMAST2PF_14984 | |
| MIGGGTDTTKLTTIWTLSLLLNNPHVLDKAKQEVDAHFRTKRRSTN | | |
| DAAAAVVDFDDIRNLVYIQAIIKESMRLYPASPVVERLSGEDCVVG | | |
| GFHVPAGTRLWANVWKMQRDPKVWDDPLVFRPDRFLSDEQKMVDVR | | |
| GQNYELLPFGAGRRVCPGVSFSLDLMQLVLTRLILEFEMKSPSGKV | | |
| DMTATPGLMSYKVIPLDILLTHRRIKPCVQSAASERDMESSGVPVI | | |
| TLGSGKVMPVLGMGTFEKVGKGSERERLAFLKAIEVGYRYFDTAAA | | |
| YETEEFLGEAIAEALQLGLIKSRDELFITSKLWPCDAHPDLVVPAL | | |
| QNSLRNLKLEYVDLYMLPFPASLKPGKITMDIPEEDICRMDYRSVW | | |
| AAMEECQNLGFTKSIGVSNFSCKKLQELMATANIPPAVNQVEMSPA | | |
| FQQKKLREYCNANNILVSAISVLGSNGTPWGSNAVLGSEVLKKIAM | | |
| AKGKSVAQVSMRWVYEQGASLVVKSFSEERLRENLNIFDWELTKED | | |
| HEKIGEIPQCRILSAYFLVSPNGPFKSQEELWDDEA* | | |
| MELQYFSYFQPTSSVVALLLALVSILFSVVVLRKTFSNNYSSPASS | P. bracteatum | SEQ. ID |
| TETAVLCHQRQQSCALPISGLLHVFMNKNGLIHVTLGNMADKYGPI | DRS-DRR | NO. 16 |
| FSFPTGSHRTLVVSSWEMVKECFTGNNDTAFSNRPIPLAFQTIFYA | | |
| CGGIDSYGLSSVPYGKYWRELRKVCVHNLLSNQQLLKFRHLIISQV | | |
| DTSFNKLYELCKNSEDNQGMVRMDDWLAQLSFNVIGRIVCGFQSDP | | |
| KTGAPSRVEQFKEVINEASYFMSTSPVSDNVPMLGWIDQLTGLTRN | | |
| MKHCGKKLDLVVESIIKDHRQKRRFSRTKGGDEKDDEQDDFIDICL | | |
| SIMEQPQLPGNNSPPQIPIKSIVLDMIGGGTDTTKLTTIWTLSLLL | | |
| NNPHVLDKAKQEVDAHFRKKRRSTDDAAAAVVDFDDIRNLVYIQAI | | |
| IKESMRLYPASPVVERLSGEDCVVGGFHVPAGTRLWANVWKMQRDP | | |
| KVWDDPLVFRPERFLSDEQKMVDVRGQNYELLPFGAGRRICPGVSF | | |
| SLDLMQLVLTRLILEFEMKSPSGKVDMTATPGLMSYKVVPLDILLT | | |
| HRRIKSCVQLASSERDMESSGVPVITLSSGKVMPVLGMGTFEKVGK | | |
| GSERERLAILKAIEVGYRYFDTAAAYETEEVLGEAIAEALQLGLIE | | |
| SRDELFISSMLWCTDAHPDRVLLALQNSLRNLKLEYLDLYMLPFPA | | |
| CSLKPGKITMDIPEEDIRMDYRSVWSAMEECQNLGFTKSIGVSNFS | | |
| CKKLQELMATANIPPAVNQVEMSPAFQQKKLREYCNANNILVSAVS | | |
| ILGSNGTPWGSNAVLGSEVLKQIAMAKGKSVAQVSMRWVYEQGASL | | |
| VVKSFSEERLRENLNIFDWELTKEDNEKIGEIPQCRILTAYFLVSP | | |
| NGPFKSQEELWDDKA* | | |
| MELQYFSYFQPTSSVVALLLALVSILFSVVVLRKTFSNNYSSPASS | P. bracteatum | SEQ. ID |
| TETAVLCHQRQQSCALPISGLLHVFMNKNGLIHVTLGNMADKYGPI | DRS | NO. 17 |
| FSFPTGSHRTLVVSSWEMVKECFTGNNDTAFSNRPIPLAFQTIFYA | | |
| CGGIDSYGLSSVPYGKYWRELRKVCVHNLLSNQQLLKFRHLIISQV | | |
| DTSFNKLYELCKNSEDNQGMVRMDDWLAQLSFNVIGRIVCGFQSDP | | |
| KTGAPSRVEQFKEVINEASYFMSTSPVSDNVPMLGWIDQLTGLTRN | | |
| MKHCGKKLDLVVESIIKDHRQKRRFSRTKGGDEKDDEQDDFIDICL | | |
| SIMEQPQLPGNNSPPQIPIKSIVLDMIGGGTDTTKLTTIWTLSLLL | | |
| NNPHVLDKAKQEVDAHFRKKRRSTDDAAAAVVDFDDIRNLVYIQAI | | |
| IKESMRLYPASPVVERLSGEDCVVGGFHVPAGTRLWANVWKMQRDP | | |
| KVWDDPLVFRPERFLSDEQKMVDVRGQNYELLPFGAGRRICPGVSF | | |
| SLDLMQLVLTRLILEFEMKSPSGKVDMTATPGLMSYKVVPLDILLT | | |
| HRRIKSCVQLASSERD | | |
| MESSGVPVITLSSGKVMPVLGMGTFEKVGKGSERERLAILKAIEVG | P. bracteatum | SEQ. ID |
| YRYFDTAAAYETEEVLGEAIAEALQLGLIESRDELFISSMLWCTDA | DRR | NO. 18 |
| HPDRVLLALQNSLRNLKLEYLDLYMLPFPASLKPGKITMDIPEEDI | | |
| CRMDYRSVWSAMEECQNLGFTKSIGVSNFSCKKLQELMATANIPPA | | |
| VNQVEMSPAFQQKKLREYCNANNILVSAVSILGSNGTPWGSNAVLG | | |
| SEVLKQIAMAKGKSVAQVSMRWVYEQGASLVVKSFSEERLRENLNI | | |
| FDWELTKEDNEKIGEIPQCRILTAYFLVSPNGPFKSQEELWDDKA* | | |
| TTCAGTTCGAGTTTATCATTATCAATACTGCCATTTCAAAGAATAC | TDH3 | SEQ. ID |
| GTAAATAATTAATAGTAGTGATTTTCCTAACTTTATTTAGTCAAAA | Promoter | NO. 19 |
| AATTAGCCTTTTAATTCTGCTGTAACCCGTACATGCCCAAAATAGG | | |
| GGGCGGGTTACACAGAATATATAACATCGTAGGTGTCTGGGTGAAC | | |
| AGTTTATTCCTGGCATCCACTAAATATAATGGAGCCCGCTTTTTAA | | |
| GCTGGCATCCAGAAAAAAAAAGAATCCCAGCACCAAAATATTGTTT | | |
| TCTTCACCAACCATCAGTTCATAGGTCCATTCTCTTAGCGCAACTA | | |
| CAGAGAACAGGGGCACAAACAGGCAAAAAACGGGCACAACCTCAAT | | |
| GGAGTGATGCAACCTGCCTGGAGTAAATGATGACACAAGGCAATTG | | |
| ACCCACGCATGTATCTATCTCATTTTCTTACACCTTCTATTACCTT | | |
| CTGCTCTCTCTGATTTGGAAAAAGCTGAAAAAAAAGGTTGAAACCA | | |
| GTTCCCTGAAATTATTCCCCTACTTGACTAATAAGTATATAAAGAC | | |
| GGTAGGTATTGATTGTAATTCTGTAAATCTATTTCTTAAACTTCTT | | |
| AAATTCTACTTTTATAGTTAGTCTTTTTTTTAGTTTTAAAACACCA | | |
| AGAACTTAGTTTCGAATAAACACACATAAACAAACAAA | | |
| GAGCGTTGGTTGGTGGATCAAGCCCACGCGTAGGCAATCCTCGAGC | CYC1 | SEQ. ID |
| AGATCCGCCAGGCGTGTATATATAGCGTGGATGGCCAGGCAACTTT | Promoter | NO. 20 |
| AGTGCTGACACATACAGGCATATATATATGTGTGCGACGACACATG | | |
| ATCATATGGCATGCATGTGCTCTGTATGTATATAAAACTCTTGTTT | | |
| TCTTCTTTTCTCTAAATATTCTTTCCTTATACATTAGGACCTTTGC | | |
| AGCATAAATTACTATACTTCTATAGACACACAAACACAAATACACA | | |
| CACTAAATTAATA | | |
| CATAGCTTCAAAATGTTTCTACTCCTTTTTTACTCTTCCAGATTTT | TEF1 Promoter | SEQ. ID |
| CTCGGACTCCGCGCATCGCCGTACCACTTCAAAACACCCAAGCACA | | NO. 21 |
| GCATACTAAATTTCCCCTCTTTCTTCCTCTAGGGTGTCGTTAATTA | | |
| CCCGTACTAAAGGTTTGGAAAAGAAAAAAGAGACCGCCTCGTTTCT | | |
| TTTTCTTCGTCGAAAAAGGCAATAAAAATTTTTATCACGTTTCTTT | | |
| TTCTTGAAAATTTTTTTTTTTGATTTTTTTCTCTTTCGATGACCTC | | |
| CCATTGATATTTAAGTTAATAAACGGTCTTCAATTTCTCAAGTTTC | | |
| AGTTTCATTTTTCTTGTTCTATTACAACTTTTTTTACTTCTTGCTC | | |
| ATTAGAAAGAAAGCATAGCAATCTAATCTAAGTTTTAATTACAAA | | |
| ACAGGCCCCTTTTCCTTTGTCGATATCATGTAATTAGTTATGTCAC | CYC1 | SEQ. ID |
| GCTTACATTCACGCCCTCCTCCCACATCCGCTCTAACCGAAAAGGA | Terminator | NO. 22 |
| AGGAGTTAGACAACCTGAAGTCTAGGTCCCTATTTATTTTTTTTAA | | |
| TAGTTATGTTAGTATTAAGAACGTTATTTATATTTCAAATTTTTCT | | |
| TTTTTTTCTGTACAAACGCGTGTACGCATGTAACATTATACTGAAA | | |
| ACCTTGCTTGAGAAGGTTTTGGGACGCTCGAAGGCTTTAATTTG | | |
| GCGAATTTCTTATGATTTATGATTTTTATTATTAAATAAGTTATAA | ADH1 | SEQ. ID |
| AAAAAATAAGTGTATACAAATTTTAAAGTGACTCTTAGGTTTTAAA | Terminator | NO. 23 |
| ACGAAAATTCTTATTCTTGAGTAACTCTTTCCTGTAGGTCAGGTTG | | |
| CTTTCTCAGGTA | | |
| CCTCGCCGCAGTTAATTAAAGTCAGTGAGCGAGGAAGCGCGTAACT | pDW10 | SEQ. ID |
| ATAACGGTCCTAAGGTAGCGAATCCTGATGCGGTATTTTCTCCTTA | | NO. 24 |
| CGCATCTGTGCGGTATTTCACACCGCATAGATCGGCAAGTGCACAA | | |
| ACAATACTTAAATAAATACTACTCAGTAATAACCTATTTCTTAGCA | | |
| TTTTTGACGAAATTTGCTATTTTGTTAGAGTCTTTTACACCATTTG | | |
| TCTCCACACCTCCGCTTACATCAACACCAATAACGCCATTTAATCT | | |
| AAGCGCATCACCAACATTTTCTGGCGTCAGTCCACCAGCTAACATA | | |
| AAATGTAAGCTTTCGGGGCTCTCTTGCCTTCCAACCCAGTCAGAAA | | |
| TCGAGTTCCAATCCAAAAGTTCACCTGTCCCACCTGCTTCTGAATC | | |
| AAACAAGGGAATAAACGAATGAGGTTTCTGTGAAGCTGCACTGAGT | | |
| AGTATGTTGCAGTCTTTTGGAAATACGAGTCTTTTAATAACTGGCA | | |
| AACCGAGGAACTCTTGGTATTCTTGCCACGACTCATCTCCATGCAG | | |
| TTGGACGATATCAATGCCGTAATCATTGACCAGAGCCAAAACATCC | | |
| TCCTTAAGTTGATTACGAAACACGCCAACCAAGTATTTCGGAGTGC | | |
| CTGAACTATTTTTATATGCTTTTACAAGACTTGAAATTTTCCTTGC | | |
| AATAACCGGGTCAATTGTTCTCTTTCTATTGGGCACACATATAATA | | |
| CCCAGCAAGTCAGCATCGGAATCTAGAGCACATTCTGCGGCCTCTG | | |
| TGCTCTGCAAGCCGCAAACTTTCACCAATGGACCAGAACTACCTGT | | |
| GAAATTAATAACAGACATACTCCAAGCTGCCTTTGTGTGCTTAATC | | |
| ACGTATACTCACGTGCTCAATAGTCACCAATGCCCTCCCTCTTGGC | | |
| CCTCTCCTTTTCTTTTTTCGACCGAATTAATTCTTAATCGGCAAAA | | |
| AAAGAAAAGCTCCGGATCAAGATTGTACGTAAGGTGACAAGCTATT | | |
| TTTCAATAAAGAATATCTTCCACTACTGCCATCTGGCGTCATAACT | | |
| GCAAAGTACACATATATTACGATGCTGTTCTATTAAATGCTTCCTA | | |
| TATTATATATATAGTAATGTCGTGATCTATGGTGCACTCTCAGTAC | | |
| AATCTGCTCTGATGCCGCATAGTTAAGCCAGCCCCGACACCCGCCA | | |
| ACACCCGCTGACGCGCCCTGACGGGCTTGTCTGCTCCCGGCATCCG | | |
| CTTACAGACAAGCTGTGACCGTCTCCGGGAGCTGCATGTGTCAGAG | | |
| GTTTTCACCGTCATCACCGAAACGCGCGAGACGAAAGGGCCTCGTG | | |
| ATACGCCTATTTTTATAGGTTAATGTCATGATAATAATGGTTTCTT | | |
| AGACGGATCGCTTGCCTGTAACTTACACGCGCCTCGTATCTTTTAA | | |
| TGATGGAATAATTTGGGAATTTACTCTGTGTTTATTTATTTTTATG | | |
| TTTTGTATTTGGATTTTAGAAAGTAAATAAAGAAGGTAGAAGAGTT | | |
| ACGGAATGAAGAAAAAAAAATAAACAAAGGTTTAAAAAATTTCAAC | | |
| AAAAAGCGTACTTTACATATATATTTATTAGACAAGAAAAGCAGAT | | |
| TAAATAGATATACATTCGATTAACGATAAGTAAAATGTAAAATCAC | | |
| AGGATTTTCGTGTGTGGTCTTCTACACAGACAAGGTGAAACAATTC | | |
| GGCATTAATACCTGAGAGCAGGAAGAGCAAGATAAAAGGTAGTATT | | |
| TGTTGGCGATCCCCCTAGAGTCTTTTACATCTTCGGAAAACAAAAA | | |
| CTATTTTTTCTTTAATTTCTTTTTTTACTTTCTATTTTTAATTTAT | | |
| ATATTTATATTAAAAAATTTAAATTATAATTATTTTTATAGCACGT | | |
| GATGAAAAGGACCCAGGTGGCACTTTTCGGGGAAATGTGCGCGGAA | | |
| CCCCTATTTGTTTATTTTTCTAAATACATTCAAATATGTATCCGCT | | |
| CATGAGACAATAACCCTGATAAATGCTTCAATAATATTGAAAAAGG | | |
| AAGAGTATGAGTATTCAACATTTCCGTGTCGCCCTTATTCCCTTTT | | |
| TTGCGGCATTTTGCCTTCCTGTTTTTGCTCACCCAGAAACGCTGGT | | |
| GAAAGTAAAAGATGCTGAAGATCAGTTGGGACGCGTAGTCTAGACC | | |
| AGCCAGGACAGAAATGCCTCGACTTCGCTGCTACCCAAGGTTGCCG | | |
| GGTGACGCACACCGTGGAAACGGATGAAGGCACGAACCCAGTGGAC | | |
| ATAAGCCTGTTCGGTTCGTAAGCTGTAATGCAAGTAGCGTATGCGC | | |
| TCACGCAACTGGTCCAGAACCTTGACCGAACGCAGCGGTGGTAACG | | |
| GCGCAGTGGCGGTTTTCATGGCTTGTTATGACTGTTTTTTTGGGGT | | |
| ACAGTCTATGCCTCGGGCATCCAAGCAGCAAGCGCGTTACGCCGTG | | |
| GGTCGATGTTTGATGTTATGGAGCAGCAACGATGTTACGCAGCAGG | | |
| GCAGTCGCCCTAAAACAAAGTTAAACATTATGAGGGAAGCGGTGAT | | |
| CGCCGAAGTATCGACTCAACTATCAGAGGTAGTTGGCGCCATCGAG | | |
| CGCCATCTCGAACCGACGTTGCTGGCCGTACATTTGTACGGCTCCG | | |
| CAGTGGATGGCGGCCTGAAGCCACACAGTGATATTGATTTGCTGGT | | |
| TACGGTGACCGTAAGGCTTGATGAAACAACGCGGCGAGCTTTGATC | | |
| AACGACCTTTTGGAAACTTCGGCTTCCCCTGGAGAGAGCGAGATTC | | |
| TCCGCGCTGTAGAAGTCACCATTGTTGTGCACGACGACATCATTCC | | |
| GTGGCGTTATCCAGCTAAGCGCGAACTGCAATTTGGAGAATGGCAG | | |
| CGCAATGACATTCTTGCAGGTATCTTCGAGCCAGCCACGATCGACA | | |
| TTGATCTGGCTATCTTGCTGACAAAAGCAAGAGAACATAGCGTTGC | | |
| CTTGGTAGGTCCAGCGGCGGAGGAACTCTTTGATCCGGTTCCTGAA | | |
| CAGGATCTATTTGAGGCGCTAAATGAAACCTTAACGCTATGGAACT | | |
| CGCCGCCCGACTGGGCTGGCGATGAGCGAAATGTAGTGCTTACGTT | | |
| GTCCCGCATTTGGTACAGCGCAGTAACCGGCAAAATCGCGCCGAAG | | |
| GATGTCGCTGCCGGCTGGGCAATGGAGCGCCTGCCGGCCCAGTATC | | |
| AGCCCGTCATACTTGAAGCTAGACAGGCTTATCTTGGACAAGAAGA | | |
| AGATCGCTTGGCCTCGCGCGCAGATCAGTTGGAAGAATTTGTCCAC | | |
| TACGTGAAAGGCGAGATCACCAAGGTAGTCGGCAAATAACCCTCGA | | |
| GCATTCAAGGCGCCTTGATTATTTGACGTGGTTTGATGGCCTCCAC | | |
| GCACGTTGTGATATGTAGATGATTCAGTTCGAGTTTATCATTATCA | | |
| ATACTGCCATTTCAAAGAATACGTAAATAATTAATAGTAGTGATTT | | |
| TCCTAACTTTATTTAGTCAAAAAATTAGCCTTTTAATTCTGCTGTA | | |
| ACCCGTACATGCCCAAAATAGGGGGCGGGTTACACAGAATATATAA | | |
| CATCGTAGGTGTCTGGGTGAACAGTTTATTCCTGGCATCCACTAAA | | |
| TATAATGGAGCCCGCTTTTTAAGCTGGCATCCAGAAAAAAAAAGAA | | |
| TCCCAGCACCAAAATATTGTTTTCTTCACCAACCATCAGTTCATAG | | |
| GTCCATTCTCTTAGCGCAACTACAGAGAACAGGGGCACAAACAGGC | | |
| AAAAAACGGGCACAACCTCAATGGAGTGATGCAACCTGCCTGGAGT | | |
| AAATGATGACACAAGGCAATTGACCCACGCATGTATCTATCTCATT | | |
| TTCTTACACCTTCTATTACCTTCTGCTCTCTCTGATTTGGAAAAAG | | |
| CTGAAAAAAAAGGTTGAAACCAGTTCCCTGAAATTATTCCCCTACT | | |
| TGACTAATAAGTATATAAAGACGGTAGGTATTGATTGTAATTCTGT | | |
| AAATCTATTTCTTAAACTTCTTAAATTCTACTTTTATAGTTAGTCT | | |
| TTTTTTTAGTTTTAAAACACCAAGAACTTAGTTTCGAATAAACACA | | |
| CATAAACAAACAAAATGGAACTTCAGTACTTCTCCTATTTTCAACC | | |
| CACTTCATCTGTCGTAGCCCTACTACTAGCACTAGTGAGTATTTTA | | |
| TTTAGCGTAGTTGTTTTGAGGAAGACTTTCAGTAACAATTACTCCA | | |
| GCCCCGCGTCAAGTACGGAAACCGCTGTGCTGTGTCATCAGAGGCA | | |
| ACAGAGTTGCGCCCTACCTATCAGCGGCCTTCTTCACGTGTTCATG | | |
| AATAAGAACGGCCTGATTCATGTCACCTTGGGAAATATGGCTGACA | | |
| AATATGGCCCTATCTTCAGTTTTCCGACAGGCAGCCACCGTACTTT | | |
| AGTAGTCAGTTCCTGGGAAATGGTGAAAGAGTGTTTCACCGGTAAT | | |
| AACGACACGGCATTCTCCAACAGACCAATCCCTTTGGCTTTTCAAA | | |
| CCATATTCTACGCCTGTGGCGGCATTGATTCTTACGGTTTAAGTAG | | |
| TGTCCCGTATGGTAAATACTGGAGGGAGTTGAGAAAGGTGTGTGTT | | |
| CACAACCTGCTGAGTAATCAGCAATTGCTGAAGTTCAGACATCTTA | | |
| TAATCTCCCAAGTGGATACGTCTTTTAACAAGTTGTATGAGCTGTG | | |
| TAAGAACTCTGAAGATAATCAAGGTATGGTAAGGATGGATGATTGG | | |
| CTAGCTCAACTTTCCTTTAACGTCATCGGTAGGATCGTTTGCGGAT | | |
| TCCAGTCTGACCCAAAGACGGGTGCACCTTCAAGGGTAGAACAGTT | | |
| TAAGGAAGTCATAAATGAGGCGTCATATTTTATGTCAACAAGTCCA | | |
| GTCTCCGATAACGTACCAATGTTGGGATGGATCGACCAATTGACCG | | |
| GTCTGACGAGGAACATGAAGCATTGTGGGAAGAAGCTTGACTTAGT | | |
| AGTGGAGTCAATTATCAAGGACCATAGGCAAAAGAGACGTTTTTCA | | |
| CGTACAAAAGGTGGCGATGAGAAGGATGACGAACAGGACGACTTTA | | |
| TTGATATTTGCTTGAGCATCATGGAGCAGCCACAGTTGCCCGGGAA | | |
| CAATTCTCCCCCTCAAATTCCGATCAAATCTATCGTGCTAGACATG | | |
| ATTGGGGGTGGTACCGACACTACGAAACTTACAACCATATGGACCC | | |
| TATCACTTTTGTTGAACAATCCTCACGTGTTAGATAAAGCTAAACA | | |
| AGAGGTCGACGCTCACTTTCGTAAAAAGAGAAGATCAACAGATGAC | | |
| GCAGCAGCGGCAGTCGTTGATTTTGACGACATAAGAAATTTAGTAT | | |
| ACATCCAAGCCATCATTAAAGAAAGTATGAGGCTTTATCCAGCCAG | | |
| CCCGGTGGTTGAGCGTCTTTCCGGCGAGGATTGCGTTGTTGGAGGT | | |
| TTTCACGTGCCTGCTGGTACGAGACTATGGGCTAACGTTTGGAAGA | | |
| TGCAAAGAGATCCCAAAGTTTGGGACGATCCTCTAGTATTCAGACC | | |
| TGAAAGGTTTTTGAGCGACGAGCAAAAGATGGTAGACGTTCGTGGC | | |
| CAAAACTATGAACTTCTGCCATTCGGCGCAGGAAGAAGAATCTGTC | | |
| CAGGCGTTTCCTTTAGTCTTGACCTTATGCAACTTGTCCTAACCAG | | |
| GTTAATCCTAGAGTTCGAAATGAAGTCCCCGTCCGGCAAGGTAGAT | | |
| ATGACCGCAACTCCAGGACTAATGTCTTACAAGGTGGTTCCATTGG | | |
| ACATATTGCTGACTCACCGTCGTATCAAGTCATGCGTTCAATTGGC | | |
| GTCTTCTGAACGTGATATGGAAAGTTCTGGGGTGCCTGTGATCACA | | |
| TTGTCCTCAGGTAAAGTAATGCCCGTACTGGGCATGGGAACCTTCG | | |
| AAAAGGTGGGTAAGGGGTCTGAACGTGAGCGTTTAGCCATTCTTAA | | |
| AGCGATCGAAGTTGGTTACCGTTACTTTGATACCGCAGCGGCATAT | | |
| GAAACGGAAGAAGTTCTAGGGGAAGCCATTGCTGAAGCTTTACAAT | | |
| TGGGTCTGATAGAGAGCCGTGACGAGCTGTTCATCAGCTCAATGCT | | |
| TTGGTGCACCGACGCACATCCAGACCGTGTGCTACTTGCTCTGCAA | | |
| AACAGTCTGAGAAATCTAAAACTTGAATATCTAGACCTATATATGT | | |
| TGCCGTTTCCTGCCAGCCTTAAGCCGGGCAAAATTACGATGGATAT | | |
| TCCTGAGGAGGATATTTGCCGTATGGATTATCGTTCAGTCTGGAGC | | |
| GCCATGGAAGAGTGTCAAAACTTAGGATTTACTAAAAGTATTGGTG | | |
| TAAGCAACTTTTCTTGCAAGAAATTACAAGAATTAATGGCCACTGC | | |
| AAATATCCCGCCCGCGGTAAATCAAGTAGAGATGTCACCAGCTTTC | | |
| CAACAGAAAAAACTGAGGGAATATTGTAACGCAAACAACATATTGG | | |
| TATCCGCAGTAAGCATTCTGGGATCAAACGGGACGCCCTGGGGTAG | | |
| TAATGCTGTTCTTGGAAGCGAAGTTTTGAAACAGATCGCGATGGCG | | |
| AAAGGCAAAAGCGTTGCGCAAGTCAGTATGAGGTGGGTCTATGAGC | | |
| AGGGCGCGTCTTTAGTAGTCAAGAGTTTCTCTGAAGAACGTTTAAG | | |
| AGAAAACCTGAATATTTTTGACTGGGAGCTTACGAAAGAAGACAAT | | |
| GAGAAGATAGGCGAAATCCCGCAATGTAGAATCCTTACTGCGTACT | | |
| TCCTTGTCTCCCCGAACGGCCCGTTTAAATCTCAGGAAGAGCTTTG | | |
| GGATGACAAGGCAtaaACAGGCCCCTTTTCCTTTGTCGATATCATG | | |
| TAATTAGTTATGTCACGCTTACATTCACGCCCTCCTCCCACATCCG | | |
| CTCTAACCGAAAAGGAAGGAGTTAGACAACCTGAAGTCTAGGTCCC | | |
| TATTTATTTTTTTTAATAGTTATGTTAGTATTAAGAACGTTATTTA | | |
| TATTTCAAATTTTTCTTTTTTTTCTGTACAAACGCGTGTACGCATG | | |
| TAACATTATACTGAAAACCTTGCTTGAGAAGGTTTTGGGACGCTCG | | |
| AAGGCTTTAATTTGTAATCATTATCACTTTACGGGTCCTTTCCGGT | | |
| GATCCGACAGGTTACGGGGCGGCGACCTCGCGGGTTTTCGCTATTT | | |
| ATGAAAATTTTCCGGTTTAAGGCGTTTCCGTTCTTCTTCGTCATAA | | |
| CTTAATGTTTTTATTTAAAATACCTCGCGAGTGGCAACACTGAAAA | | |
| TACCCATGGAGCGGCGTAACCGTCGCACAGgatctaggtgaagatc | | |
| ctattgataatctcatgaccaaaatcccttaacgtgagttacgacc | | |
| actgagcgtcagaccccgtagaaaagatcaaaggatcttcttgaga | | |
| tcctattactgcgcgtaatctgctgcttgcaaacaaaaaaaccacc | | |
| gctaccagcggtggtttgtttgccggatcaagagctaccaactctt | | |
| tttccgaaggtaactggcttcagcagagcgcagataccaaatactg | | |
| tccttctagtgtagccgtagttaggccaccacttcaagaactctgt | | |
| agcaccgcctacatacctcgctctgctaatcctgttaccagtggct | | |
| gctgccagtggcgataagtcgtgtcttaccgggttggactcaagac | | |
| gatagttaccggataaggcgcagcggtcgggctgaacggggggttc | | |
| gtgcacacagcccagcttggagcgaacgacctacaccgaactgaga | | |
| tacctacagcgtgagctatgagaaagcgccacgcttcccgaaggga | | |
| gaaaggcggacaggtatccggtaagcggcagggtcggaacaggaga | | |
| gcgcacgagggagcttccagggggaaacgcctggtatctttatagt | | |
| cctgtcgggtacgccacctctgacttgagcgtcgatttttgtgatg | | |
| ctcgtcaggggggcggagcctatggaaaaacgccagcaacgcggca | | |
| gtggaacgTGCATTATGAATTAGTTACGCTAGGGATAACAGGGTAA | | |
| TATAGAACCCGAACGACCGAGCGCAGCGGCGGCCGCGCTGATACCG | | |
| CCGC | | |
| CCTCGCCGCAGTTAATTAAAGTCAGTGAGCGAGGAAGCGCGTAACT | pDW18 | SEQ. ID |
| ATAACGGTCCTAAGGTAGCGAATCCTGATGCGGTATTTTCTCCTTA | | NO. 25 |
| CGCATCTGTGCGGTATTTCACACCGCATAGATCGGCAAGTGCACAA | | |
| ACAATACTTAAATAAATACTACTCAGTAATAACCTATTTCTTAGCA | | |
| TTTTTGACGAAATTTGCTATTTTGTTAGAGTCTTTTACACCATTTG | | |
| TCTCCACACCTCCGCTTACATCAACACCAATAACGCCATTTAATCT | | |
| AAGCGCATCACCAACATTTTCTGGCGTCAGTCCACCAGCTAACATA | | |
| AAATGTAAGCTTTCGGGGCTCTCTTGCCTTCCAACCCAGTCAGAAA | | |
| TCGAGTTCCAATCCAAAAGTTCACCTGTCCCACCTGCTTCTGAATC | | |
| AAACAAGGGAATAAACGAATGAGGTTTCTGTGAAGCTGCACTGAGT | | |
| AGTATGTTGCAGTCTTTTGGAAATACGAGTCTTTTAATAACTGGCA | | |
| AACCGAGGAACTCTTGGTATTCTTGCCACGACTCATCTCCATGCAG | | |
| TTGGACGATATCAATGCCGTAATCATTGACCAGAGCCAAAACATCC | | |
| TCCTTAAGTTGATTACGAAACACGCCAACCAAGTATTTCGGAGTGC | | |
| CTGAACTATTTTTATATGCTTTTACAAGACTTGAAATTTTCCTTGC | | |
| AATAACCGGGTCAATTGTTCTCTTTCTATTGGGCACACATATAATA | | |
| CCCAGCAAGTCAGCATCGGAATCTAGAGCACATTCTGCGGCCTCTG | | |
| TGCTCTGCAAGCCGCAAACTTTCACCAATGGACCAGAACTACCTGT | | |
| GAAATTAATAACAGACATACTCCAAGCTGCCTTTGTGTGCTTAATC | | |
| ACGTATACTCACGTGCTCAATAGTCACCAATGCCCTCCCTCTTGGC | | |
| CCTCTCCTTTTCTTTTTTCGACCGAATTAATTCTTAATCGGCAAAA | | |
| AAAGAAAAGCTCCGGATCAAGATTGTACGTAAGGTGACAAGCTATT | | |
| TTTCAATAAAGAATATCTTCCACTACTGCCATCTGGCGTCATAACT | | |
| GCAAAGTACACATATATTACGATGCTGTTCTATTAAATGCTTCCTA | | |
| TATTATATATATAGTAATGTCGTGATCTATGGTGCACTCTCAGTAC | | |
| AATCTGCTCTGATGCCGCATAGTTAAGCCAGCCCCGACACCCGCCA | | |
| ACACCCGCTGACGCGCCCTGACGGGCTTGTCTGCTCCCGGCATCCG | | |
| CTTACAGACAAGCTGTGACCGTCTCCGGGAGCTGCATGTGTCAGAG | | |
| GTTTTCACCGTCATCACCGAAACGCGCGAGACGAAAGGGCCTCGTG | | |
| ATACGCCTATTTTTATAGGTTAATGTCATGATAATAATGGTTTCTT | | |
| AGACGGATCGCTTGCCTGTAACTTACACGCGCCTCGTATCTTTTAA | | |
| TGATGGAATAATTTGGGAATTTACTCTGTGTTTATTTATTTTTATG | | |
| TTTTGTATTTGGATTTTAGAAAGTAAATAAAGAAGGTAGAAGAGTT | | |
| ACGGAATGAAGAAAAAAAAATAAACAAAGGTTTAAAAAATTTCAAC | | |
| AAAAAGCGTACTTTACATATATATTTATTAGACAAGAAAAGCAGAT | | |
| TAAATAGATATACATTCGATTAACGATAAGTAAAATGTAAAATCAC | | |
| AGGATTTTCGTGTGTGGTCTTCTACACAGACAAGGTGAAACAATTC | | |
| GGCATTAATACCTGAGAGCAGGAAGAGCAAGATAAAAGGTAGTATT | | |
| TGTTGGCGATCCCCCTAGAGTCTTTTACATCTTCGGAAAACAAAAA | | |
| CTATTTTTTCTTTAATTTCTTTTTTTACTTTCTATTTTTAATTTAT | | |
| ATATTTATATTAAAAAATTTAAATTATAATTATTTTTATAGCACGT | | |
| GATGAAAAGGACCCAGGTGGCACTTTTCGGGGAAATGTGCGCGGAA | | |
| CCCCTATTTGTTTATTTTTCTAAATACATTCAAATATGTATCCGCT | | |
| CATGAGACAATAACCCTGATAAATGCTTCAATAATATTGAAAAAGG | | |
| AAGAGTATGAGTATTCAACATTTCCGTGTCGCCCTTATTCCCTTTT | | |
| TTGCGGCATTTTGCCTTCCTGTTTTTGCTCACCCAGAAACGCTGGT | | |
| GAAAGTAAAAGATGCTGAAGATCAGTTGGGACGCGTAGTCTAGACC | | |
| AGCCAGGACAGAAATGCCTCGACTTCGCTGCTACCCAAGGTTGCCG | | |
| GGTGACGCACACCGTGGAAACGGATGAAGGCACGAACCCAGTGGAC | | |
| ATAAGCCTGTTCGGTTCGTAAGCTGTAATGCAAGTAGCGTATGCGC | | |
| TCACGCAACTGGTCCAGAACCTTGACCGAACGCAGCGGTGGTAACG | | |
| GCGCAGTGGCGGTTTTCATGGCTTGTTATGACTGTTTTTTTGGGGT | | |
| ACAGTCTATGCCTCGGGCATCCAAGCAGCAAGCGCGTTACGCCGTG | | |
| GGTCGATGTTTGATGTTATGGAGCAGCAACGATGTTACGCAGCAGG | | |
| GCAGTCGCCCTAAAACAAAGTTAAACATTATGAGGGAAGCGGTGAT | | |
| CGCCGAAGTATCGACTCAACTATCAGAGGTAGTTGGCGCCATCGAG | | |
| CGCCATCTCGAACCGACGTTGCTGGCCGTACATTTGTACGGCTCCG | | |
| CAGTGGATGGCGGCCTGAAGCCACACAGTGATATTGATTTGCTGGT | | |
| TACGGTGACCGTAAGGCTTGATGAAACAACGCGGCGAGCTTTGATC | | |
| AACGACCTTTTGGAAACTTCGGCTTCCCCTGGAGAGAGCGAGATTC | | |
| TCCGCGCTGTAGAAGTCACCATTGTTGTGCACGACGACATCATTCC | | |
| GTGGCGTTATCCAGCTAAGCGCGAACTGCAATTTGGAGAATGGCAG | | |
| CGCAATGACATTCTTGCAGGTATCTTCGAGCCAGCCACGATCGACA | | |
| TTGATCTGGCTATCTTGCTGACAAAAGCAAGAGAACATAGCGTTGC | | |
| CTTGGTAGGTCCAGCGGCGGAGGAACTCTTTGATCCGGTTCCTGAA | | |
| CAGGATCTATTTGAGGCGCTAAATGAAACCTTAACGCTATGGAACT | | |
| CGCCGCCCGACTGGGCTGGCGATGAGCGAAATGTAGTGCTTACGTT | | |
| GTCCCGCATTTGGTACAGCGCAGTAACCGGCAAAATCGCGCCGAAG | | |
| GATGTCGCTGCCGGCTGGGCAATGGAGCGCCTGCCGGCCCAGTATC | | |
| AGCCCGTCATACTTGAAGCTAGACAGGCTTATCTTGGACAAGAAGA | | |
| AGATCGCTTGGCCTCGCGCGCAGATCAGTTGGAAGAATTTGTCCAC | | |
| TACGTGAAAGGCGAGATCACCAAGGTAGTCGGCAAATAACCCTCGA | | |
| GCATTCAAGGCGCCTTGATTATTTGACGTGGTTTGATGGCCTCCAC | | |
| GCACGTTGTGATATGTAGATGAGAGCGTTGGTTGGTGGATCAAGCC | | |
| CACGCGTAGGCAATCCTCGAGCAGATCCGCCAGGCGTGTATATATA | | |
| GCGTGGATGGCCAGGCAACTTTAGTGCTGACACATACAGGCATATA | | |
| TATATGTGTGCGACGACACATGATCATATGGCATGCATGTGCTCTG | | |
| TATGTATATAAAACTCTTGTTTTCTTCTTTTCTCTAAATATTCTTT | | |
| CCTTATACATTAGGACCTTTGCAGCATAAATTACTATACTTCTATA | | |
| GACACACAAACACAAATACACACACTAAATTAATAATGGAACTTCA | | |
| GTACTTCTCCTATTTTCAACCCACTTCATCTGTCGTAGCCCTACTA | | |
| CTAGCACTAGTGAGTATTTTATTTAGCGTAGTTGTTTTGAGGAAGA | | |
| CTTTCAGTAACAATTACTCCAGCCCCGCGTCAAGTACGGAAACCGC | | |
| TGTGCTGTGTCATCAGAGGCAACAGAGTTGCGCCCTACCTATCAGC | | |
| GGCCTTCTTCACGTGTTCATGAATAAGAACGGCCTGATTCATGTCA | | |
| CCTTGGGAAATATGGCTGACAAATATGGCCCTATCTTCAGTTTTCC | | |
| GACAGGCAGCCACCGTACTTTAGTAGTCAGTTCCTGGGAAATGGTG | | |
| AAAGAGTGTTTCACCGGTAATAACGACACGGCATTCTCCAACAGAC | | |
| CAATCCCTTTGGCTTTTCAAACCATATTCTACGCCTGTGGCGGCAT | | |
| TGATTCTTACGGTTTAAGTAGTGTCCCGTATGGTAAATACTGGAGG | | |
| GAGTTGAGAAAGGTGTGTGTTCACAACCTGCTGAGTAATCAGCAAT | | |
| TGCTGAAGTTCAGACATCTTATAATCTCCCAAGTGGATACGTCTTT | | |
| TAACAAGTTGTATGAGCTGTGTAAGAACTCTGAAGATAATCAAGGT | | |
| ATGGTAAGGATGGATGATTGGCTAGCTCAACTTTCCTTTAACGTCA | | |
| TCGGTAGGATCGTTTGCGGATTCCAGTCTGACCCAAAGACGGGTGC | | |
| ACCTTCAAGGGTAGAACAGTTTAAGGAAGTCATAAATGAGGCGTCA | | |
| TATTTTATGTCAACAAGTCCAGTCTCCGATAACGTACCAATGTTGG | | |
| GATGGATCGACCAATTGACCGGTCTGACGAGGAACATGAAGCATTG | | |
| TGGGAAGAAGCTTGACTTAGTAGTGGAGTCAATTATCAAGGACCAT | | |
| AGGCAAAAGAGACGTTTTTCACGTACAAAAGGTGGCGATGAGAAGG | | |
| ATGACGAACAGGACGACTTTATTGATATTTGCTTGAGCATCATGGA | | |
| GCAGCCACAGTTGCCCGGGAACAATTCTCCCCCTCAAATTCCGATC | | |
| AAATCTATCGTGCTAGACATGATTGGGGGTGGTACCGACACTACGA | | |
| AACTTACAACCATATGGACCCTATCACTTTTGTTGAACAATCCTCA | | |
| CGTGTTAGATAAAGCTAAACAAGAGGTCGACGCTCACTTTCGTAAA | | |
| AAGAGAAGATCAACAGATGACGCAGCAGCGGCAGTCGTTGATTTTG | | |
| ACGACATAAGAAATTTAGTATACATCCAAGCCATCATTAAAGAAAG | | |
| TATGAGGCTTTATCCAGCCAGCCCGGTGGTTGAGCGTCTTTCCGGC | | |
| GAGGATTGCGTTGTTGGAGGTTTTCACGTGCCTGCTGGTACGAGAC | | |
| TATGGGCTAACGTTTGGAAGATGCAAAGAGATCCCAAAGTTTGGGA | | |
| CGATCCTCTAGTATTCAGACCTGAAAGGTTTTTGAGCGACGAGCAA | | |
| AAGATGGTAGACGTTCGTGGCCAAAACTATGAACTTCTGCCATTCG | | |
| GCGCAGGAAGAAGAATCTGTCCAGGCGTTTCCTTTAGTCTTGACCT | | |
| TATGCAACTTGTCCTAACCAGGTTAATCCTAGAGTTCGAAATGAAG | | |
| TCCCCGTCCGGCAAGGTAGATATGACCGCAACTCCAGGACTAATGT | | |
| CTTACAAGGTGGTTCCATTGGACATATTGCTGACTCACCGTCGTAT | | |
| CAAGTCATGCGTTCAATTGGCGTCTTCTGAACGTGATATGGAAAGT | | |
| TCTGGGGTGCCTGTGATCACATTGTCCTCAGGTAAAGTAATGCCCG | | |
| TACTGGGCATGGGAACCTTCGAAAAGGTGGGTAAGGGGTCTGAACG | | |
| TGAGCGTTTAGCCATTCTTAAAGCGATCGAAGTTGGTTACCGTTAC | | |
| TTTGATACCGCAGCGGCATATGAAACGGAAGAAGTTCTAGGGGAAG | | |
| CCATTGCTGAAGCTTTACAATTGGGTCTGATAGAGAGCCGTGACGA | | |
| GCTGTTCATCAGCTCAATGCTTTGGTGCACCGACGCACATCCAGAC | | |
| CGTGTGCTACTTGCTCTGCAAAACAGTCTGAGAAATCTAAAACTTG | | |
| AATATCTAGACCTATATATGTTGCCGTTTCCTGCCAGCCTTAAGCC | | |
| GGGCAAAATTACGATGGATATTCCTGAGGAGGATATTTGCCGTATG | | |
| GATTATCGTTCAGTCTGGAGCGCCATGGAAGAGTGTCAAAACTTAG | | |
| GATTTACTAAAAGTATTGGTGTAAGCAACTTTTCTTGCAAGAAATT | | |
| ACAAGAATTAATGGCCACTGCAAATATCCCGCCCGCGGTAAATCAA | | |
| GTAGAGATGTCACCAGCTTTCCAACAGAAAAAACTGAGGGAATATT | | |
| GTAACGCAAACAACATATTGGTATCCGCAGTAAGCATTCTGGGATC | | |
| AAACGGGACGCCCTGGGGTAGTAATGCTGTTCTTGGAAGCGAAGTT | | |
| TTGAAACAGATCGCGATGGCGAAAGGCAAAAGCGTTGCGCAAGTCA | | |
| GTATGAGGTGGGTCTATGAGCAGGGCGCGTCTTTAGTAGTCAAGAG | | |
| TTTCTCTGAAGAACGTTTAAGAGAAAACCTGAATATTTTTGACTGG | | |
| GAGCTTACGAAAGAAGACAATGAGAAGATAGGCGAAATCCCGCAAT | | |
| GTAGAATCCTTACTGCGTACTTCCTTGTCTCCCCGAACGGCCCGTT | | |
| TAAATCTCAGGAAGAGCTTTGGGATGACAAGGCAtaaACAGGCCCC | | |
| TTTTCCTTTGTCGATATCATGTAATTAGTTATGTCACGCTTACATT | | |
| CACGCCCTCCTCCCACATCCGCTCTAACCGAAAAGGAAGGAGTTAG | | |
| ACAACCTGAAGTCTAGGTCCCTATTTATTTTTTTTAATAGTTATGT | | |
| TAGTATTAAGAACGTTATTTATATTTCAAATTTTTCTTTTTTTTCT | | |
| GTACAAACGCGTGTACGCATGTAACATTATACTGAAAACCTTGCTT | | |
| GAGAAGGTTTTGGGACGCTCGAAGGCTTTAATTTGTAATCATTATC | | |
| ACTTTACGGGTCCTTTCCGGTGATCCGACAGGTTACGGGGCGGCGA | | |
| CCTCGCGGGTTTTCGCTATTTATGAAAATTTTCCGGTTTAAGGCGT | | |
| TTCCGTTCTTCTTCGTCATAACTTAATGTTTTTATTTAAAATACCT | | |
| CGCGAGTGGCAACACTGAAAATACCCATGGAGCGGCGTAACCGTCG | | |
| CACAGgatctaggtgaagatcctttttgataatctcatgaccaaaa | | |
| tcccttaacgtgagttttcgttccactgagcgtcagaccccgtaga | | |
| aaagatcaaaggatcttcttgagatccttttttctgcgcgtaatct | | |
| gctgcttgcaaacaaaaaaaccaccgctaccagcggtggtttgttt | | |
| gccggatcaagagctaccaactctttttccgaaggtaactggcttc | | |
| agcagagcgcagataccaaatactgtccttctagtgtagccgtagt | | |
| taggccaccacttcaagaactctgtagcaccgcctacatacctcgc | | |
| tctgctaatcctgttaccagtggctgctgccagtggcgataagtcg | | |
| tgtcttaccgggttggactcaagacgatagttaccggataaggcgc | | |
| agcggtcgggctgaacggggggttcgtgcacacagcccagcttgga | | |
| gcgaacgacctacaccgaactgagatacctacagcgtgagctatga | | |
| gaaagcgccacgcttcccgaagggagaaaggcggacaggtatccgg | | |
| taagcggcagggtcggaacaggagagcgcacgagggagcttccagg | | |
| gggaaacgcctggtatctttatagtcctgtcgggtttcgccacctc | | |
| tgacttgagcgtcgatttttgtgatgctcgtcaggggggcggagcc | | |
| tatggaaaaacgccagcaacgcggcagtggaacgTGCATTATGAAT | | |
| TAGTTACGCTAGGGATAACAGGGTAATATAGAACCCGAACGACCGA | | |
| GCGCAGCGGCGGCCGCGCTGATACCGCCGC | | |
| CCTCGCCGCAGTTAATTAAAGTCAGTGAGCGAGGAAGCGCGTAACT | pDW21 | SEQ. ID |
| ATAACGGTCCTAAGGTAGCGAATCCTGATGCGGTATTTTCTCCTTA | | NO. 26 |
| CGCATCTGTGCGGTATTTCACACCGCATAGATCGGCAAGTGCACAA | | |
| ACAATACTTAAATAAATACTACTCAGTAATAACCTATTTCTTAGCA | | |
| TTTTTGACGAAATTTGCTATTTTGTTAGAGTCTTTTACACCATTTG | | |
| TCTCCACACCTCCGCTTACATCAACACCAATAACGCCATTTAATCT | | |
| AAGCGCATCACCAACATTTTCTGGCGTCAGTCCACCAGCTAACATA | | |
| AAATGTAAGCTTTCGGGGCTCTCTTGCCTTCCAACCCAGTCAGAAA | | |
| TCGAGTTCCAATCCAAAAGTTCACCTGTCCCACCTGCTTCTGAATC | | |
| AAACAAGGGAATAAACGAATGAGGTTTCTGTGAAGCTGCACTGAGT | | |
| AGTATGTTGCAGTCTTTTGGAAATACGAGTCTTTTAATAACTGGCA | | |
| AACCGAGGAACTCTTGGTATTCTTGCCACGACTCATCTCCATGCAG | | |
| TTGGACGATATCAATGCCGTAATCATTGACCAGAGCCAAAACATCC | | |
| TCCTTAAGTTGATTACGAAACACGCCAACCAAGTATTTCGGAGTGC | | |
| CTGAACTATTTTTATATGCTTTTACAAGACTTGAAATTTTCCTTGC | | |
| AATAACCGGGTCAATTGTTCTCTTTCTATTGGGCACACATATAATA | | |
| CCCAGCAAGTCAGCATCGGAATCTAGAGCACATTCTGCGGCCTCTG | | |
| TGCTCTGCAAGCCGCAAACTTTCACCAATGGACCAGAACTACCTGT | | |
| GAAATTAATAACAGACATACTCCAAGCTGCCTTTGTGTGCTTAATC | | |
| ACGTATACTCACGTGCTCAATAGTCACCAATGCCCTCCCTCTTGGC | | |
| CCTCTCCTTTTCTTTTTTCGACCGAATTAATTCTTAATCGGCAAAA | | |
| AAAGAAAAGCTCCGGATCAAGATTGTACGTAAGGTGACAAGCTATT | | |
| TTTCAATAAAGAATATCTTCCACTACTGCCATCTGGCGTCATAACT | | |
| GCAAAGTACACATATATTACGATGCTGTTCTATTAAATGCTTCCTA | | |
| TATTATATATATAGTAATGTCGTGATCTATGGTGCACTCTCAGTAC | | |
| AATCTGCTCTGATGCCGCATAGTTAAGCCAGCCCCGACACCCGCCA | | |
| ACACCCGCTGACGCGCCCTGACGGGCTTGTCTGCTCCCGGCATCCG | | |
| CTTACAGACAAGCTGTGACCGTCTCCGGGAGCTGCATGTGTCAGAG | | |
| GTTTTCACCGTCATCACCGAAACGCGCGAGACGAAAGGGCCTCGTG | | |
| ATACGCCTATTTTTATAGGTTAATGTCATGATAATAATGGTTTCTT | | |
| AGACGGATCGCTTGCCTGTAACTTACACGCGCCTCGTATCTTTTAA | | |
| TGATGGAATAATTTGGGAATTTACTCTGTGTTTATTTATTTTTATG | | |
| TTTTGTATTTGGATTTTAGAAAGTAAATAAAGAAGGTAGAAGAGTT | | |
| ACGGAATGAAGAAAAAAAAATAAACAAAGGTTTAAAAAATTTCAAC | | |
| AAAAAGCGTACTTTACATATATATTTATTAGACAAGAAAAGCAGAT | | |
| TAAATAGATATACATTCGATTAACGATAAGTAAAATGTAAAATCAC | | |
| AGGATTTTCGTGTGTGGTCTTCTACACAGACAAGGTGAAACAATTC | | |
| GGCATTAATACCTGAGAGCAGGAAGAGCAAGATAAAAGGTAGTATT | | |
| TGTTGGCGATCCCCCTAGAGTCTTTTACATCTTCGGAAAACAAAAA | | |
| CTATTTTTTCTTTAATTTCTTTTTTTACTTTCTATTTTTAATTTAT | | |
| ATATTTATATTAAAAAATTTAAATTATAATTATTTTTATAGCACGT | | |
| GATGAAAAGGACCCAGGTGGCACTTTTCGGGGAAATGTGCGCGGAA | | |
| CCCCTATTTGTTTATTTTTCTAAATACATTCAAATATGTATCCGCT | | |
| CATGAGACAATAACCCTGATAAATGCTTCAATAATATTGAAAAAGG | | |
| AAGAGTATGAGTATTCAACATTTCCGTGTCGCCCTTATTCCCTTTT | | |
| TTGCGGCATTTTGCCTTCCTGTTTTTGCTCACCCAGAAACGCTGGT | | |
| GAAAGTAAAAGATGCTGAAGATCAGTTGGGACGCGTAGTCTAGACC | | |
| AGCCAGGACAGAAATGCCTCGACTTCGCTGCTACCCAAGGTTGCCG | | |
| GGTGACGCACACCGTGGAAACGGATGAAGGCACGAACCCAGTGGAC | | |
| ATAAGCCTGTTCGGTTCGTAAGCTGTAATGCAAGTAGCGTATGCGC | | |
| TCACGCAACTGGTCCAGAACCTTGACCGAACGCAGCGGTGGTAACG | | |
| GCGCAGTGGCGGTTTTCATGGCTTGTTATGACTGTTTTTTTGGGGT | | |
| ACAGTCTATGCCTCGGGCATCCAAGCAGCAAGCGCGTTACGCCGTG | | |
| GGTCGATGTTTGATGTTATGGAGCAGCAACGATGTTACGCAGCAGG | | |
| GCAGTCGCCCTAAAACAAAGTTAAACATTATGAGGGAAGCGGTGAT | | |
| CGCCGAAGTATCGACTCAACTATCAGAGGTAGTTGGCGCCATCGAG | | |
| CGCCATCTCGAACCGACGTTGCTGGCCGTACATTTGTACGGCTCCG | | |
| CAGTGGATGGCGGCCTGAAGCCACACAGTGATATTGATTTGCTGGT | | |
| TACGGTGACCGTAAGGCTTGATGAAACAACGCGGCGAGCTTTGATC | | |
| AACGACCTTTTGGAAACTTCGGCTTCCCCTGGAGAGAGCGAGATTC | | |
| TCCGCGCTGTAGAAGTCACCATTGTTGTGCACGACGACATCATTCC | | |
| GTGGCGTTATCCAGCTAAGCGCGAACTGCAATTTGGAGAATGGCAG | | |
| CGCAATGACATTCTTGCAGGTATCTTCGAGCCAGCCACGATCGACA | | |
| TTGATCTGGCTATCTTGCTGACAAAAGCAAGAGAACATAGCGTTGC | | |
| CTTGGTAGGTCCAGCGGCGGAGGAACTCTTTGATCCGGTTCCTGAA | | |
| CAGGATCTATTTGAGGCGCTAAATGAAACCTTAACGCTATGGAACT | | |
| CGCCGCCCGACTGGGCTGGCGATGAGCGAAATGTAGTGCTTACGTT | | |
| GTCCCGCATTTGGTACAGCGCAGTAACCGGCAAAATCGCGCCGAAG | | |
| GATGTCGCTGCCGGCTGGGCAATGGAGCGCCTGCCGGCCCAGTATC | | |
| AGCCCGTCATACTTGAAGCTAGACAGGCTTATCTTGGACAAGAAGA | | |
| AGATCGCTTGGCCTCGCGCGCAGATCAGTTGGAAGAATTTGTCCAC | | |
| TACGTGAAAGGCGAGATCACCAAGGTAGTCGGCAAATAACCCTCGA | | |
| GCATTCAAGGCGCCTTGATTATTTGACGTGGTTTGATGGCCTCCAC | | |
| GCACGTTGTGATATGTAGATGAGAGCGTTGGTTGGTGGATCAAGCC | | |
| CACGCGTAGGCAATCCTCGAGCAGATCCGCCAGGCGTGTATATATA | | |
| GCGTGGATGGCCAGGCAACTTTAGTGCTGACACATACAGGCATATA | | |
| TATATGTGTGCGACGACACATGATCATATGGCATGCATGTGCTCTG | | |
| TATGTATATAAAACTCTTGTTTTCTTCTTTTCTCTAAATATTCTTT | | |
| CCTTATACATTAGGACCTTTGCAGCATAAATTACTATACTTCTATA | | |
| GACACACAAACACAAATACACACACTAAATTAATAATGGAACTTCA | | |
| GTACTTCTCCTATTTTCAACCCACTTCATCTGTCGTAGCCCTACTA | | |
| CTAGCACTAGTGAGTATTTTATTTAGCGTAGTTGTTTTGAGGAAGA | | |
| CTTTCAGTAACAATTACTCCAGCCCCGCGTCAAGTACGGAAACCGC | | |
| TGTGCTGTGTCATCAGAGGCAACAGAGTTGCGCCCTACCTATCAGC | | |
| GGCCTTCTTCACGTGTTCATGAATAAGAACGGCCTGATTCATGTCA | | |
| CCTTGGGAAATATGGCTGACAAATATGGCCCTATCTTCAGTTTTCC | | |
| GACAGGCAGCCACCGTACTTTAGTAGTCAGTTCCTGGGAAATGGTG | | |
| AAAGAGTGTTTCACCGGTAATAACGACACGGCATTCTCCAACAGAC | | |
| CAATCCCTTTGGCTTTTCAAACCATATTCTACGCCTGTGGCGGCAT | | |
| TGATTCTTACGGTTTAAGTAGTGTCCCGTATGGTAAATACTGGAGG | | |
| GAGTTGAGAAAGGTGTGTGTTCACAACCTGCTGAGTAATCAGCAAT | | |
| TGCTGAAGTTCAGACATCTTATAATCTCCCAAGTGGATACGTCTTT | | |
| TAACAAGTTGTATGAGCTGTGTAAGAACTCTGAAGATAATCAAGGT | | |
| ATGGTAAGGATGGATGATTGGCTAGCTCAACTTTCCTTTAACGTCA | | |
| TCGGTAGGATCGTTTGCGGATTCCAGTCTGACCCAAAGACGGGTGC | | |
| ACCTTCAAGGGTAGAACAGTTTAAGGAAGTCATAAATGAGGCGTCA | | |
| TATTTTATGTCAACAAGTCCAGTCTCCGATAACGTACCAATGTTGG | | |
| GATGGATCGACCAATTGACCGGTCTGACGAGGAACATGAAGCATTG | | |
| TGGGAAGAAGCTTGACTTAGTAGTGGAGTCAATTATCAAGGACCAT | | |
| AGGCAAAAGAGACGTTTTTCACGTACAAAAGGTGGCGATGAGAAGG | | |
| ATGACGAACAGGACGACTTTATTGATATTTGCTTGAGCATCATGGA | | |
| GCAGCCACAGTTGCCCGGGAACAATTCTCCCCCTCAAATTCCGATC | | |
| AAATCTATCGTGCTAGACATGATTGGGGGTGGTACCGACACTACGA | | |
| AACTTACAACCATATGGACCCTATCACTTTTGTTGAACAATCCTCA | | |
| CGTGTTAGATAAAGCTAAACAAGAGGTCGACGCTCACTTTCGTAAA | | |
| AAGAGAAGATCAACAGATGACGCAGCAGCGGCAGTCGTTGATTTTG | | |
| ACGACATAAGAAATTTAGTATACATCCAAGCCATCATTAAAGAAAG | | |
| TATGAGGCTTTATCCAGCCAGCCCGGTGGTTGAGCGTCTTTCCGGC | | |
| GAGGATTGCGTTGTTGGAGGTTTTCACGTGCCTGCTGGTACGAGAC | | |
| TATGGGCTAACGTTTGGAAGATGCAAAGAGATCCCAAAGTTTGGGA | | |
| CGATCCTCTAGTATTCAGACCTGAAAGGTTTTTGAGCGACGAGCAA | | |
| AAGATGGTAGACGTTCGTGGCCAAAACTATGAACTTCTGCCATTCG | | |
| GCGCAGGAAGAAGAATCTGTCCAGGCGTTTCCTTTAGTCTTGACCT | | |
| TATGCAACTTGTCCTAACCAGGTTAATCCTAGAGTTCGAAATGAAG | | |
| TCCCCGTCCGGCAAGGTAGATATGACCGCAACTCCAGGACTAATGT | | |
| CTTACAAGGTGGTTCCATTGGACATATTGCTGACTCACCGTCGTAT | | |
| CAAGTCATGCGTTCAATTGGCGTCTTCTGAACGTGATtaaGCGAAT | | |
| TTCTTATGATTTATGATTTTTATTATTAAATAAGTTATAAAAAAAA | | |
| TAAGTGTATACAAATTTTAAAGTGACTCTTAGGTTTTAAAACGAAA | | |
| ATTCTTATTCTTGAGTAACTCTTTCCTGTAGGTCAGGTTGCTTTCT | | |
| CAGGTACATAGCTTCAAAATGTTTCTACTCCTTTTTTACTCTTCCA | | |
| GATTTTCTCGGACTCCGCGCATCGCCGTACCACTTCAAAACACCCA | | |
| AGCACAGCATACTAAATTTCCCCTCTTTCTTCCTCTAGGGTGTCGT | | |
| TAATTACCCGTACTAAAGGTTTGGAAAAGAAAAAAGAGACCGCCTC | | |
| GTTTCTTTTTCTTCGTCGAAAAAGGCAATAAAAATTTTTATCACGT | | |
| TTCTTTTTCTTGAAAATTTTTTTTTTTGATTTTTTTCTCTTTCGAT | | |
| GACCTCCCATTGATATTTAAGTTAATAAACGGTCTTCAATTTCTCA | | |
| AGTTTCAGTTTCATTTTTCTTGTTCTATTACAACTTTTTTTACTTC | | |
| TTGCTCATTAGAAAGAAAGCATAGCAATCTAATCTAAGTTTTAATT | | |
| ACAAAATGGAAAGTTCTGGGGTGCCTGTGATCACATTGTCCTCAGG | | |
| TAAAGTAATGCCCGTACTGGGCATGGGAACCTTCGAAAAGGTGGGT | | |
| AAGGGGTCTGAACGTGAGCGTTTAGCCATTCTTAAAGCGATCGAAG | | |
| TTGGTTACCGTTACTTTGATACCGCAGCGGCATATGAAACGGAAGA | | |
| AGTTCTAGGGGAAGCCATTGCTGAAGCTTTACAATTGGGTCTGATA | | |
| GAGAGCCGTGACGAGCTGTTCATCAGCTCAATGCTTTGGTGCACCG | | |
| ACGCACATCCAGACCGTGTGCTACTTGCTCTGCAAAACAGTCTGAG | | |
| AAATCTAAAACTTGAATATCTAGACCTATATATGTTGCCGTTTCCT | | |
| GCCAGCCTTAAGCCGGGCAAAATTACGATGGATATTCCTGAGGAGG | | |
| ATATTTGCCGTATGGATTATCGTTCAGTCTGGAGCGCCATGGAAGA | | |
| GTGTCAAAACTTAGGATTTACTAAAAGTATTGGTGTAAGCAACTTT | | |
| TCTTGCAAGAAATTACAAGAATTAATGGCCACTGCAAATATCCCGC | | |
| CCGCGGTAAATCAAGTAGAGATGTCACCAGCTTTCCAACAGAAAAA | | |
| ACTGAGGGAATATTGTAACGCAAACAACATATTGGTATCCGCAGTA | | |
| AGCATTCTGGGATCAAACGGGACGCCCTGGGGTAGTAATGCTGTTC | | |
| TTGGAAGCGAAGTTTTGAAACAGATCGCGATGGCGAAAGGCAAAAG | | |
| CGTTGCGCAAGTCAGTATGAGGTGGGTCTATGAGCAGGGCGCGTCT | | |
| TTAGTAGTCAAGAGTTTCTCTGAAGAACGTTTAAGAGAAAACCTGA | | |
| ATATTTTTGACTGGGAGCTTACGAAAGAAGACAATGAGAAGATAGG | | |
| CGAAATCCCGCAATGTAGAATCCTTACTGCGTACTTCCTTGTCTCC | | |
| CCGAACGGCCCGTTTAAATCTCAGGAAGAGCTTTGGGATGACAAGG | | |
| CAtaaACAGGCCCCTTTTCCTTTGTCGATATCATGTAATTAGTTAT | | |
| GTCACGCTTACATTCACGCCCTCCTCCCACATCCGCTCTAACCGAA | | |
| AAGGAAGGAGTTAGACAACCTGAAGTCTAGGTCCCTATTTATTTTT | | |
| TTTAATAGTTATGTTAGTATTAAGAACGTTATTTATATTTCAAATT | | |
| TTTCTTTTTTTTCTGTACAAACGCGTGTACGCATGTAACATTATAC | | |
| TGAAAACCTTGCTTGAGAAGGTTTTGGGACGCTCGAAGGCTTTAAT | | |
| TTGTAATCATTATCACTTTACGGGTCCTTTCCGGTGATCCGACAGG | | |
| TTACGGGGCGGCGACCTCGCGGGTTTTCGCTATTTATGAAAATTTT | | |
| CCGGTTTAAGGCGTTTCCGTTCTTCTTCGTCATAACTTAATGTTTT | | |
| TATTTAAAATACCTCGCGAGTGGCAACACTGAAAATACCCATGGAG | | |
| CGGCGTAACCGTCGCACAGgatctaggtgaagatcctttttgataa | | |
| tctcatgaccaaaatcccttaacgtgagttttcgttccactgagcg | | |
| tcagaccccgtagaaaagatcaaaggatcttcttgagatccttttt | | |
| ttctgcgcgtaatctgctgcttgcaaacaaaaaaaccaccgctacc | | |
| agcggtggtttgtttgccggatcaagagctaccaactctttttccg | | |
| aaggtaactggcttcagcagagcgcagataccaaatactgtccttc | | |
| tagtgtagccgtagttaggccaccacttcaagaactctgtagcacc | | |
| gcctacatacctcgctctgctaatcctgttaccagtggctgctgcc | | |
| agtggcgataagtcgtgtcttaccgggaggactcaagacgatagtt | | |
| accggataaggcgcagcggtcgggctgaacggggggttcgtgcaca | | |
| cagcccagcttggagcgaacgacctacaccgaactgagatacctac | | |
| agcgtgagctatgagaaagcgccacgcttcccgaagggagaaaggc | | |
| ggacaggtatccggtaagcggcagggtcggaacaggagagcgcacg | | |
| agggagcttccagggggaaacgcctggtatctttatagtcctgtcg | | |
| ggtttcgccacctctgacttgagcgtcgatttttgtgatgctcgtc | | |
| aggggggcggagcctatggaaaaacgccagcaacgcggcagtggaa | | |
| cgTGCATTATGAATTAGTTACGCTAGGGATAACAGGGTAATATAGA | | |
| ACCCGAACGACCGAGCGCAGCGGCGGCCGCGCTGATACCGCCGC | | |
| CCTCGCCGCAGTTAATTAAAGTCAGTGAGCGAGGAAGCGCGTAACT | pJL29 | SEQ. ID |
| ATAACGGTCCTAAGGTAGCGAATCCTGATGCGGTATTTTCTCCTTA | | NO. 27 |
| CGCATCTGTGCGGTATTTCACACCGCATAGATCGGCAAGTGCACAA | | |
| ACAATACTTAAATAAATACTACTCAGTAATAACCTATTTCTTAGCA | | |
| TTTTTGACGAAATTTGCTATTTTGTTAGAGTCTTTTACACCATTTG | | |
| TCTCCACACCTCCGCTTACATCAACACCAATAACGCCATTTAATCT | | |
| AAGCGCATCACCAACATTTTCTGGCGTCAGTCCACCAGCTAACATA | | |
| AAATGTAAGCTTTCGGGGCTCTCTTGCCTTCCAACCCAGTCAGAAA | | |
| TCGAGTTCCAATCCAAAAGTTCACCTGTCCCACCTGCTTCTGAATC | | |
| AAACAAGGGAATAAACGAATGAGGTTTCTGTGAAGCTGCACTGAGT | | |
| AGTATGTTGCAGTCTTTTGGAAATACGAGTCTTTTAATAACTGGCA | | |
| AACCGAGGAACTCTTGGTATTCTTGCCACGACTCATCTCCATGCAG | | |
| TTGGACGATATCAATGCCGTAATCATTGACCAGAGCCAAAACATCC | | |
| TCCTTAAGTTGATTACGAAACACGCCAACCAAGTATTTCGGAGTGC | | |
| CTGAACTATTTTTATATGCTTTTACAAGACTTGAAATTTTCCTTGC | | |
| AATAACCGGGTCAATTGTTCTCTTTCTATTGGGCACACATATAATA | | |
| CCCAGCAAGTCAGCATCGGAATCTAGAGCACATTCTGCGGCCTCTG | | |
| TGCTCTGCAAGCCGCAAACTTTCACCAATGGACCAGAACTACCTGT | | |
| GAAATTAATAACAGACATACTCCAAGCTGCCTTTGTGTGCTTAATC | | |
| ACGTATACTCACGTGCTCAATAGTCACCAATGCCCTCCCTCTTGGC | | |
| CCTCTCCTTTTCTTTTTTCGACCGAATTAATTCTTAATCGGCAAAA | | |
| AAAGAAAAGCTCCGGATCAAGATTGTACGTAAGGTGACAAGCTATT | | |
| TTTCAATAAAGAATATCTTCCACTACTGCCATCTGGCGTCATAACT | | |
| GCAAAGTACACATATATTACGATGCTGTTCTATTAAATGCTTCCTA | | |
| TATTATATATATAGTAATGTCGTGATCTATGGTGCACTCTCAGTAC | | |
| AATCTGCTCTGATGCCGCATAGTTAAGCCAGCCCCGACACCCGCCA | | |
| ACACCCGCTGACGCGCCCTGACGGGCTTGTCTGCTCCCGGCATCCG | | |
| CTTACAGACAAGCTGTGACCGTCTCCGGGAGCTGCATGTGTCAGAG | | |
| GTTTTCACCGTCATCACCGAAACGCGCGAGACGAAAGGGCCTCGTG | | |
| ATACGCCTATTTTTATAGGTTAATGTCATGATAATAATGGTTTCTT | | |
| AGACGGATCGCTTGCCTGTAACTTACACGCGCCTCGTATCTTTTAA | | |
| TGATGGAATAATTTGGGAATTTACTCTGTGTTTATTTATTTTTATG | | |
| TTTTGTATTTGGATTTTAGAAAGTAAATAAAGAAGGTAGAAGAGTT | | |
| ACGGAATGAAGAAAAAAAAATAAACAAAGGTTTAAAAAATTTCAAC | | |
| AAAAAGCGTACTTTACATATATATTTATTAGACAAGAAAAGCAGAT | | |
| TAAATAGATATACATTCGATTAACGATAAGTAAAATGTAAAATCAC | | |
| AGGATTTTCGTGTGTGGTCTTCTACACAGACAAGGTGAAACAATTC | | |
| GGCATTAATACCTGAGAGCAGGAAGAGCAAGATAAAAGGTAGTATT | | |
| TGTTGGCGATCCCCCTAGAGTCTTTTACATCTTCGGAAAACAAAAA | | |
| CTATTTTTTCTTTAATTTCTTTTTTTACTTTCTATTTTTAATTTAT | | |
| ATATTTATATTAAAAAATTTAAATTATAATTATTTTTATAGCACGT | | |
| GATGAAAAGGACCCAGGTGGCACTTTTCGGGGAAATGTGCGCGGAA | | |
| CCCCTATTTGTTTATTTTTCTAAATACATTCAAATATGTATCCGCT | | |
| CATGAGACAATAACCCTGATAAATGCTTCAATAATATTGAAAAAGG | | |
| AAGAGTATGAGTATTCAACATTTCCGTGTCGCCCTTATTCCCTTTT | | |
| TTGCGGCATTTTGCCTTCCTGTTTTTGCTCACCCAGAAACGCTGGT | | |
| GAAAGTAAAAGATGCTGAAGATCAGTTGGGACGCGTAGTCTAGACC | | |
| AGCCAGGACAGAAATGCCTCGACTTCGCTGCTACCCAAGGTTGCCG | | |
| GGTGACGCACACCGTGGAAACGGATGAAGGCACGAACCCAGTGGAC | | |
| ATAAGCCTGTTCGGTTCGTAAGCTGTAATGCAAGTAGCGTATGCGC | | |
| TCACGCAACTGGTCCAGAACCTTGACCGAACGCAGCGGTGGTAACG | | |
| GCGCAGTGGCGGTTTTCATGGCTTGTTATGACTGTTTTTTTGGGGT | | |
| ACAGTCTATGCCTCGGGCATCCAAGCAGCAAGCGCGTTACGCCGTG | | |
| GGTCGATGTTTGATGTTATGGAGCAGCAACGATGTTACGCAGCAGG | | |
| GCAGTCGCCCTAAAACAAAGTTAAACATTATGAGGGAAGCGGTGAT | | |
| CGCCGAAGTATCGACTCAACTATCAGAGGTAGTTGGCGCCATCGAG | | |
| CGCCATCTCGAACCGACGTTGCTGGCCGTACATTTGTACGGCTCCG | | |
| CAGTGGATGGCGGCCTGAAGCCACACAGTGATATTGATTTGCTGGT | | |
| TACGGTGACCGTAAGGCTTGATGAAACAACGCGGCGAGCTTTGATC | | |
| AACGACCTTTTGGAAACTTCGGCTTCCCCTGGAGAGAGCGAGATTC | | |
| TCCGCGCTGTAGAAGTCACCATTGTTGTGCACGACGACATCATTCC | | |
| GTGGCGTTATCCAGCTAAGCGCGAACTGCAATTTGGAGAATGGCAG | | |
| CGCAATGACATTCTTGCAGGTATCTTCGAGCCAGCCACGATCGACA | | |
| TTGATCTGGCTATCTTGCTGACAAAAGCAAGAGAACATAGCGTTGC | | |
| CTTGGTAGGTCCAGCGGCGGAGGAACTCTTTGATCCGGTTCCTGAA | | |
| CAGGATCTATTTGAGGCGCTAAATGAAACCTTAACGCTATGGAACT | | |
| CGCCGCCCGACTGGGCTGGCGATGAGCGAAATGTAGTGCTTACGTT | | |
| GTCCCGCATTTGGTACAGCGCAGTAACCGGCAAAATCGCGCCGAAG | | |
| GATGTCGCTGCCGGCTGGGCAATGGAGCGCCTGCCGGCCCAGTATC | | |
| AGCCCGTCATACTTGAAGCTAGACAGGCTTATCTTGGACAAGAAGA | | |
| AGATCGCTTGGCCTCGCGCGCAGATCAGTTGGAAGAATTTGTCCAC | | |
| TACGTGAAAGGCGAGATCACCAAGGTAGTCGGCAAATAACCCTCGA | | |
| GCATTCAAGGCGCCTTGATTATTTGACGTGGTTTGATGGCCTCCAC | | |
| GCACGTTGTGATATGTAGATGATTCAGTTCGAGTTTATCATTATCA | | |
| ATACTGCCATTTCAAAGAATACGTAAATAATTAATAGTAGTGATTT | | |
| TCCTAACTTTATTTAGTCAAAAAATTAGCCTTTTAATTCTGCTGTA | | |
| ACCCGTACATGCCCAAAATAGGGGGCGGGTTACACAGAATATATAA | | |
| CATCGTAGGTGTCTGGGTGAACAGTTTATTCCTGGCATCCACTAAA | | |
| TATAATGGAGCCCGCTTTTTAAGCTGGCATCCAGAAAAAAAAAGAA | | |
| TCCCAGCACCAAAATATTGTTTTCTTCACCAACCATCAGTTCATAG | | |
| GTCCATTCTCTTAGCGCAACTACAGAGAACAGGGGCACAAACAGGC | | |
| AAAAAACGGGCACAACCTCAATGGAGTGATGCAACCTGCCTGGAGT | | |
| AAATGATGACACAAGGCAATTGACCCACGCATGTATCTATCTCATT | | |
| TTCTTACACCTTCTATTACCTTCTGCTCTCTCTGATTTGGAAAAAG | | |
| CTGAAAAAAAAGGTTGAAACCAGTTCCCTGAAATTATTCCCCTACT | | |
| TGACTAATAAGTATATAAAGACGGTAGGTATTGATTGTAATTCTGT | | |
| AAATCTATTTCTTAAACTTCTTAAATTCTACTTTTATAGTTAGTCT | | |
| TTTTTTTAGTTTTAAAACACCAAGAACTTAGTTTCGAATAAACACA | | |
| CATAAACAAACAAAATGGAACTTCAGTACTTCTCCTATTTTCAACC | | |
| CACTTCATCTGTCGTAGCCCTACTACTAGCACTAGTGAGTATTTTA | | |
| TTTAGCGTAGTTGTTTTGAGGAAGACTTTCAGTAACAATTACTCCA | | |
| GCCCCGCGTCAAGTACGGAAACCGCTGTGCTGTGTCATCAGAGGCA | | |
| ACAGAGTTGCGCCCTACCTATCAGCGGCCTTCTTCACGTGTTCATG | | |
| AATAAGAACGGCCTGATTCATGTCACCTTGGGAAATATGGCTGACA | | |
| AATATGGCCCTATCTTCAGTTTTCCGACAGGCAGCCACCGTACTTT | | |
| AGTAGTCAGTTCCTGGGAAATGGTGAAAGAGTGTTTCACCGGTAAT | | |
| AACGACACGGCATTCTCCAACAGACCAATCCCTTTGGCTTTTCAAA | | |
| CCATATTCTACGCCTGTGGCGGCATTGATTCTTACGGTTTAAGTAG | | |
| TGTCCCGTATGGTAAATACTGGAGGGAGTTGAGAAAGGTGTGTGTT | | |
| CACAACCTGCTGAGTAATCAGCAATTGCTGAAGTTCAGACATCTTA | | |
| TAATCTCCCAAGTGGATACGTCTTTTAACAAGTTGTATGAGCTGTG | | |
| TAAGAACTCTGAAGATAATCAAGGTATGGTAAGGATGGATGATTGG | | |
| CTAGCTCAACTTTCCTTTAACGTCATCGGTAGGATCGTTTGCGGAT | | |
| TCCAGTCTGACCCAAAGACGGGTGCACCTTCAAGGGTAGAACAGTT | | |
| TAAGGAAGTCATAAATGAGGCGTCATATTTTATGTCAACAAGTCCA | | |
| GTCTCCGATAACGTACCAATGTTGGGATGGATCGACCAATTGACCG | | |
| GTCTGACGAGGAACATGAAGCATTGTGGGAAGAAGCTTGACTTAGT | | |
| AGTGGAGTCAATTATCAAGGACCATAGGCAAAAGAGACGTTTTTCA | | |
| CGTACAAAAGGTGGCGATGAGAAGGATGACGAACAGGACGACTTTA | | |
| TTGATATTTGCTTGAGCATCATGGAGCAGCCACAGTTGCCCGGGAA | | |
| CAATTCTCCCCCTCAAATTCCGATCAAATCTATCGTGCTAGACATG | | |
| ATTGGGGGTGGTACCGACACTACGAAACTTACAACCATATGGACCC | | |
| TATCACTTTTGTTGAACAATCCTCACGTGTTAGATAAAGCTAAACA | | |
| AGAGGTCGACGCTCACTTTCGTAAAAAGAGAAGATCAACAGATGAC | | |
| GCAGCAGCGGCAGTCGTTGATTTTGACGACATAAGAAATTTAGTAT | | |
| ACATCCAAGCCATCATTAAAGAAAGTATGAGGCTTTATCCAGCCAG | | |
| CCCGGTGGTTGAGCGTCTTTCCGGCGAGGATTGCGTTGTTGGAGGT | | |
| TTTCACGTGCCTGCTGGTACGAGACTATGGGCTAACGTTTGGAAGA | | |
| TGCAAAGAGATCCCAAAGTTTGGGACGATCCTCTAGTATTCAGACC | | |
| TGAAAGGTTTTTGAGCGACGAGCAAAAGATGGTAGACGTTCGTGGC | | |
| CAAAACTATGAACTTCTGCCATTCGGCGCAGGAAGAAGAATCTGTC | | |
| CAGGCGTTTCCTTTAGTCTTGACCTTATGCAACTTGTCCTAACCAG | | |
| GTTAATCCTAGAGTTCGAAATGAAGTCCCCGTCCGGCAAGGTAGAT | | |
| ATGACCGCAACTCCAGGACTAATGTCTTACAAGGTGGTTCCATTGG | | |
| ACATATTGCTGACTCACCGTCGTATCAAGTCATGCGTTCAATTGGC | | |
| GTCTTCTGAACGTGATtaaGCGAATTTCTTATGATTTATGATTTTT | | |
| ATTATTAAATAAGTTATAAAAAAAATAAGTGTATACAAATTTTAAA | | |
| GTGACTCTTAGGTTTTAAAACGAAAATTCTTATTCTTGAGTAACTC | | |
| TTTCCTGTAGGTCAGGTTGCTTTCTCAGGTACATAGCTTCAAAATG | | |
| TTTCTACTCCTTTTTTACTCTTCCAGATTTTCTCGGACTCCGCGCA | | |
| TCGCCGTACCACTTCAAAACACCCAAGCACAGCATACTAAATTTCC | | |
| CCTCTTTCTTCCTCTAGGGTGTCGTTAATTACCCGTACTAAAGGTT | | |
| TGGAAAAGAAAAAAGAGACCGCCTCGTTTCTTTTTCTTCGTCGAAA | | |
| AAGGCAATAAAAATTTTTATCACGTTTCTTTTTCTTGAAAATTTTT | | |
| TTTTTTGATTTTTTTCTCTTTCGATGACCTCCCATTGATATTTAAG | | |
| TTAATAAACGGTCTTCAATTTCTCAAGTTTCAGTTTCATTTTTCTT | | |
| GTTCTATTACAACTTTTTTTACTTCTTGCTCATTAGAAAGAAAGCA | | |
| TAGCAATCTAATCTAAGTTTTAATTACAAAATGGAAAGTTCTGGGG | | |
| TGCCTGTGATCACATTGTCCTCAGGTAAAGTAATGCCCGTACTGGG | | |
| CATGGGAACCTTCGAAAAGGTGGGTAAGGGGTCTGAACGTGAGCGT | | |
| TTAGCCATTCTTAAAGCGATCGAAGTTGGTTACCGTTACTTTGATA | | |
| CCGCAGCGGCATATGAAACGGAAGAAGTTCTAGGGGAAGCCATTGC | | |
| TGAAGCTTTACAATTGGGTCTGATAGAGAGCCGTGACGAGCTGTTC | | |
| ATCAGCTCAATGCTTTGGTGCACCGACGCACATCCAGACCGTGTGC | | |
| TACTTGCTCTGCAAAACAGTCTGAGAAATCTAAAACTTGAATATCT | | |
| AGACCTATATATGTTGCCGTTTCCTGCCAGCCTTAAGCCGGGCAAA | | |
| ATTACGATGGATATTCCTGAGGAGGATATTTGCCGTATGGATTATC | | |
| GTTCAGTCTGGAGCGCCATGGAAGAGTGTCAAAACTTAGGATTTAC | | |
| TAAAAGTATTGGTGTAAGCAACTTTTCTTGCAAGAAATTACAAGAA | | |
| TTAATGGCCACTGCAAATATCCCGCCCGCGGTAAATCAAGTAGAGA | | |
| TGTCACCAGCTTTCCAACAGAAAAAACTGAGGGAATATTGTAACGC | | |
| AAACAACATATTGGTATCCGCAGTAAGCATTCTGGGATCAAACGGG | | |
| ACGCCCTGGGGTAGTAATGCTGTTCTTGGAAGCGAAGTTTTGAAAC | | |
| AGATCGCGATGGCGAAAGGCAAAAGCGTTGCGCAAGTCAGTATGAG | | |
| GTGGGTCTATGAGCAGGGCGCGTCTTTAGTAGTCAAGAGTTTCTCT | | |
| GAAGAACGTTTAAGAGAAAACCTGAATATTTTTGACTGGGAGCTTA | | |
| CGAAAGAAGACAATGAGAAGATAGGCGAAATCCCGCAATGTAGAAT | | |
| CCTTACTGCGTACTTCCTTGTCTCCCCGAACGGCCCGTTTAAATCT | | |
| CAGGAAGAGCTTTGGGATGACAAGGCAtaaACAGGCCCCTTTTCCT | | |
| TTGTCGATATCATGTAATTAGTTATGTCACGCTTACATTCACGCCC | | |
| TCCTCCCACATCCGCTCTAACCGAAAAGGAAGGAGTTAGACAACCT | | |
| GAAGTCTAGGTCCCTATTTATTTTTTTTAATAGTTATGTTAGTATT | | |
| AAGAACGTTATTTATATTTCAAATTTTTCTTTTTTTTCTGTACAAA | | |
| CGCGTGTACGCATGTAACATTATACTGAAAACCTTGCTTGAGAAGG | | |
| TTTTGGGACGCTCGAAGGCTTTAATTTGTAATCATTATCACTTTAC | | |
| GGGTCCTTTCCGGTGATCCGACAGGTTACGGGGCGGCGACCTCGCG | | |
| GGTTTTCGCTATTTATGAAAATTTTCCGGTTTAAGGCGTTTCCGTT | | |
| CTTCTTCGTCATAACTTAATGTTTTTATTTAAAATACCTCGCGAGT | | |
| GGCAACACTGAAAATACCCATGGAGCGGCGTAACCGTCGCACAGga | | |
| tctaggtgaagatcctttttgataatctcatgaccaaaatccctta | | |
| acgtgagttttcgttccactgagcgtcagaccccgtagaaaagatc | | |
| aaaggatcttcttgagatcctttttttctgcgcgtaatctgctgct | | |
| tgcaaacaaaaaaaccaccgctaccagcggtggtttgtttgccgga | | |
| tcaagagctaccaactctttttccgaaggtaactggcttcagcaga | | |
| gcgcagataccaaatactgtccttctagtgtagccgtagttaggcc | | |
| accacttcaagaactctgtagcaccgcctacatacctcgctctgct | | |
| aatcctgttaccagtggctgctgccagtggcgataagtcgtgtctt | | |
| accgggttggactcaagacgatagttaccggataaggcgcagcggt | | |
| cgggctgaacggggggttcgtgcacacagcccagcttggagcgaac | | |
| gacctacaccgaactgagatacctacagcgtgagctatgagaaagc | | |
| gccacgcttcccgaagggagaaaggcggacaggtatccggtaagcg | | |
| gcagggtcggaacaggagagcgcacgagggagcttccagggggaaa | | |
| cgcctggtatctttatagtcctgtcgggtttcgccacctctgactt | | |
| gagcgtcgatttttgtgatgctcgtcaggggggcggagcctatgga | | |
| aaaacgccagcaacgcggcagtggaacgTGCATTATGAATTAGTTA | | |
| CGCTAGGGATAACAGGGTAATATAGAACCCGAACGACCGAGCGCAG | | |
| CGGCGGCCGCGCTGATACCGCCGC | | |
| CCTCGCCGCAGTTAATTAAAGTCAGTGAGCGAGGAAGCGCGTAACT | pJL32 | SEQ. ID |
| ATAACGGTCCTAAGGTAGCGAATCCTGATGCGGTATTTTCTCCTTA | | NO. 28 |
| CGCATCTGTGCGGTATTTCACACCGCATAGATCGGCAAGTGCACAA | | |
| ACAATACTTAAATAAATACTACTCAGTAATAACCTATTTCTTAGCA | | |
| TTTTTGACGAAATTTGCTATTTTGTTAGAGTCTTTTACACCATTTG | | |
| TCTCCACACCTCCGCTTACATCAACACCAATAACGCCATTTAATCT | | |
| AAGCGCATCACCAACATTTTCTGGCGTCAGTCCACCAGCTAACATA | | |
| AAATGTAAGCTTTCGGGGCTCTCTTGCCTTCCAACCCAGTCAGAAA | | |
| TCGAGTTCCAATCCAAAAGTTCACCTGTCCCACCTGCTTCTGAATC | | |
| AAACAAGGGAATAAACGAATGAGGTTTCTGTGAAGCTGCACTGAGT | | |
| AGTATGTTGCAGTCTTTTGGAAATACGAGTCTTTTAATAACTGGCA | | |
| AACCGAGGAACTCTTGGTATTCTTGCCACGACTCATCTCCATGCAG | | |
| TTGGACGATATCAATGCCGTAATCATTGACCAGAGCCAAAACATCC | | |
| TCCTTAAGTTGATTACGAAACACGCCAACCAAGTATTTCGGAGTGC | | |
| CTGAACTATTTTTATATGCTTTTACAAGACTTGAAATTTTCCTTGC | | |
| AATAACCGGGTCAATTGTTCTCTTTCTATTGGGCACACATATAATA | | |
| CCCAGCAAGTCAGCATCGGAATCTAGAGCACATTCTGCGGCCTCTG | | |
| TGCTCTGCAAGCCGCAAACTTTCACCAATGGACCAGAACTACCTGT | | |
| GAAATTAATAACAGACATACTCCAAGCTGCCTTTGTGTGCTTAATC | | |
| ACGTATACTCACGTGCTCAATAGTCACCAATGCCCTCCCTCTTGGC | | |
| CCTCTCCTTTTCTTTTTTCGACCGAATTAATTCTTAATCGGCAAAA | | |
| AAAGAAAAGCTCCGGATCAAGATTGTACGTAAGGTGACAAGCTATT | | |
| TTTCAATAAAGAATATCTTCCACTACTGCCATCTGGCGTCATAACT | | |
| GCAAAGTACACATATATTACGATGCTGTTCTATTAAATGCTTCCTA | | |
| TATTATATATATAGTAATGTCGTGATCTATGGTGCACTCTCAGTAC | | |
| AATCTGCTCTGATGCCGCATAGTTAAGCCAGCCCCGACACCCGCCA | | |
| ACACCCGCTGACGCGCCCTGACGGGCTTGTCTGCTCCCGGCATCCG | | |
| CTTACAGACAAGCTGTGACCGTCTCCGGGAGCTGCATGTGTCAGAG | | |
| GTTTTCACCGTCATCACCGAAACGCGCGAGACGAAAGGGCCTCGTG | | |
| ATACGCCTATTTTTATAGGTTAATGTCATGATAATAATGGTTTCTT | | |
| AGACGGATCGCTTGCCTGTAACTTACACGCGCCTCGTATCTTTTAA | | |
| TGATGGAATAATTTGGGAATTTACTCTGTGTTTATTTATTTTTATG | | |
| TTTTGTATTTGGATTTTAGAAAGTAAATAAAGAAGGTAGAAGAGTT | | |
| ACGGAATGAAGAAAAAAAAATAAACAAAGGTTTAAAAAATTTCAAC | | |
| AAAAAGCGTACTTTACATATATATTTATTAGACAAGAAAAGCAGAT | | |
| TAAATAGATATACATTCGATTAACGATAAGTAAAATGTAAAATCAC | | |
| AGGATTTTCGTGTGTGGTCTTCTACACAGACAAGGTGAAACAATTC | | |
| GGCATTAATACCTGAGAGCAGGAAGAGCAAGATAAAAGGTAGTATT | | |
| TGTTGGCGATCCCCCTAGAGTCTTTTACATCTTCGGAAAACAAAAA | | |
| CTATTTTTTCTTTAATTTCTTTTTTTACTTTCTATTTTTAATTTAT | | |
| ATATTTATATTAAAAAATTTAAATTATAATTATTTTTATAGCACGT | | |
| GATGAAAAGGACCCAGGTGGCACTTTTCGGGGAAATGTGCGCGGAA | | |
| CCCCTATTTGTTTATTTTTCTAAATACATTCAAATATGTATCCGCT | | |
| CATGAGACAATAACCCTGATAAATGCTTCAATAATATTGAAAAAGG | | |
| AAGAGTATGAGTATTCAACATTTCCGTGTCGCCCTTATTCCCTTTT | | |
| TTGCGGCATTTTGCCTTCCTGTTTTTGCTCACCCAGAAACGCTGGT | | |
| GAAAGTAAAAGATGCTGAAGATCAGTTGGGACGCGTAGTCTAGACC | | |
| AGCCAGGACAGAAATGCCTCGACTTCGCTGCTACCCAAGGTTGCCG | | |
| GGTGACGCACACCGTGGAAACGGATGAAGGCACGAACCCAGTGGAC | | |
| ATAAGCCTGTTCGGTTCGTAAGCTGTAATGCAAGTAGCGTATGCGC | | |
| TCACGCAACTGGTCCAGAACCTTGACCGAACGCAGCGGTGGTAACG | | |
| GCGCAGTGGCGGTTTTCATGGCTTGTTATGACTGTTTTTTTGGGGT | | |
| ACAGTCTATGCCTCGGGCATCCAAGCAGCAAGCGCGTTACGCCGTG | | |
| GGTCGATGTTTGATGTTATGGAGCAGCAACGATGTTACGCAGCAGG | | |
| GCAGTCGCCCTAAAACAAAGTTAAACATTATGAGGGAAGCGGTGAT | | |
| CGCCGAAGTATCGACTCAACTATCAGAGGTAGTTGGCGCCATCGAG | | |
| CGCCATCTCGAACCGACGTTGCTGGCCGTACATTTGTACGGCTCCG | | |
| CAGTGGATGGCGGCCTGAAGCCACACAGTGATATTGATTTGCTGGT | | |
| TACGGTGACCGTAAGGCTTGATGAAACAACGCGGCGAGCTTTGATC | | |
| AACGACCTTTTGGAAACTTCGGCTTCCCCTGGAGAGAGCGAGATTC | | |
| TCCGCGCTGTAGAAGTCACCATTGTTGTGCACGACGACATCATTCC | | |
| GTGGCGTTATCCAGCTAAGCGCGAACTGCAATTTGGAGAATGGCAG | | |
| CGCAATGACATTCTTGCAGGTATCTTCGAGCCAGCCACGATCGACA | | |
| TTGATCTGGCTATCTTGCTGACAAAAGCAAGAGAACATAGCGTTGC | | |
| CTTGGTAGGTCCAGCGGCGGAGGAACTCTTTGATCCGGTTCCTGAA | | |
| CAGGATCTATTTGAGGCGCTAAATGAAACCTTAACGCTATGGAACT | | |
| CGCCGCCCGACTGGGCTGGCGATGAGCGAAATGTAGTGCTTACGTT | | |
| GTCCCGCATTTGGTACAGCGCAGTAACCGGCAAAATCGCGCCGAAG | | |
| GATGTCGCTGCCGGCTGGGCAATGGAGCGCCTGCCGGCCCAGTATC | | |
| AGCCCGTCATACTTGAAGCTAGACAGGCTTATCTTGGACAAGAAGA | | |
| AGATCGCTTGGCCTCGCGCGCAGATCAGTTGGAAGAATTTGTCCAC | | |
| TACGTGAAAGGCGAGATCACCAAGGTAGTCGGCAAATAACCCTCGA | | |
| GCATTCAAGGCGCCTTGATTATTTGACGTGGTTTGATGGCCTCCAC | | |
| GCACGTTGTGATATGTAGATGAGAGCGTTGGTTGGTGGATCAAGCC | | |
| CACGCGTAGGCAATCCTCGAGCAGATCCGCCAGGCGTGTATATATA | | |
| GCGTGGATGGCCAGGCAACTTTAGTGCTGACACATACAGGCATATA | | |
| TATATGTGTGCGACGACACATGATCATATGGCATGCATGTGCTCTG | | |
| TATGTATATAAAACTCTTGTTTTCTTCTTTTCTCTAAATATTCTTT | | |
| CCTTATACATTAGGACCTTTGCAGCATAAATTACTATACTTCTATA | | |
| GACACACAAACACAAATACACACACTAAATTAATAATGGAACTTCA | | |
| GTACTTCTCCTATTTTCAACCCACTTCATCTGTCGTAGCCCTACTA | | |
| CTAGCACTAGTGAGTATTTTATTTAGCGTAGTTGTTTTGAGGAAGA | | |
| CTTTCAGTAACAATTACTCCAGCCCCGCGTCAAGTACGGAAACCGC | | |
| TGTGCTGTGTCATCAGAGGCAACAGAGTTGCGCCCTACCTATCAGC | | |
| GGCCTTCTTCACGTGTTCATGAATAAGAACGGCCTGATTCATGTCA | | |
| CCTTGGGAAATATGGCTGACAAATATGGCCCTATCTTCAGTTTTCC | | |
| GACAGGCAGCCACCGTACTTTAGTAGTCAGTTCCTGGGAAATGGTG | | |
| AAAGAGTGTTTCACCGGTAATAACGACACGGCATTCTCCAACAGAC | | |
| CAATCCCTTTGGCTTTTCAAACCATATTCTACGCCTGTGGCGGCAT | | |
| TGATTCTTACGGTTTAAGTAGTGTCCCGTATGGTAAATACTGGAGG | | |
| GAGTTGAGAAAGGTGTGTGTTCACAACCTGCTGAGTAATCAGCAAT | | |
| TGCTGAAGTTCAGACATCTTATAATCTCCCAAGTGGATACGTCTTT | | |
| TAACAAGTTGTATGAGCTGTGTAAGAACTCTGAAGATAATCAAGGT | | |
| ATGGTAAGGATGGATGATTGGCTAGCTCAACTTTCCTTTAACGTCA | | |
| TCGGTAGGATCGTTTGCGGATTCCAGTCTGACCCAAAGACGGGTGC | | |
| ACCTTCAAGGGTAGAACAGTTTAAGGAAGTCATAAATGAGGCGTCA | | |
| TATTTTATGTCAACAAGTCCAGTCTCCGATAACGTACCAATGTTGG | | |
| GATGGATCGACCAATTGACCGGTCTGACGAGGAACATGAAGCATTG | | |
| TGGGAAGAAGCTTGACTTAGTAGTGGAGTCAATTATCAAGGACCAT | | |
| AGGCAAAAGAGACGTTTTTCACGTACAAAAGGTGGCGATGAGAAGG | | |
| ATGACGAACAGGACGACTTTATTGATATTTGCTTGAGCATCATGGA | | |
| GCAGCCACAGTTGCCCGGGAACAATTCTCCCCCTCAAATTCCGATC | | |
| AAATCTATCGTGCTAGACATGATTGGGGGTGGTACCGACACTACGA | | |
| AACTTACAACCATATGGACCCTATCACTTTTGTTGAACAATCCTCA | | |
| CGTGTTAGATAAAGCTAAACAAGAGGTCGACGCTCACTTTCGTAAA | | |
| AAGAGAAGATCAACAGATGACGCAGCAGCGGCAGTCGTTGATTTTG | | |
| ACGACATAAGAAATTTAGTATACATCCAAGCCATCATTAAAGAAAG | | |
| TATGAGGCTTTATCCAGCCAGCCCGGTGGTTGAGCGTCTTTCCGGC | | |
| GAGGATTGCGTTGTTGGAGGTTTTCACGTGCCTGCTGGTACGAGAC | | |
| TATGGGCTAACGTTTGGAAGATGCAAAGAGATCCCAAAGTTTGGGA | | |
| CGATCCTCTAGTATTCAGACCTGAAAGGTTTTTGAGCGACGAGCAA | | |
| AAGATGGTAGACGTTCGTGGCCAAAACTATGAACTTCTGCCATTCG | | |
| GCGCAGGAAGAAGAATCTGTCCAGGCGTTTCCTTTAGTCTTGACCT | | |
| TATGCAACTTGTCCTAACCAGGTTAATCCTAGAGTTCGAAATGAAG | | |
| TCCCCGTCCGGCAAGGTAGATATGACCGCAACTCCAGGACTAATGT | | |
| CTTACAAGGTGGTTCCATTGGACATATTGCTGACTCACCGTCGTAT | | |
| CAAGTCATGCGTTCAATTGGCGTCTTCTGAACGTGATtaaGCGAAT | | |
| TTCTTATGATTTATGATTTTTATTATTAAATAAGTTATAAAAAAAA | | |
| TAAGTGTATACAAATTTTAAAGTGACTCTTAGGTTTTAAAACGAAA | | |
| ATTCTTATTCTTGAGTAACTCTTTCCTGTAGGTCAGGTTGCTTTCT | | |
| CAGGTATTCAGTTCGAGTTTATCATTATCAATACTGCCATTTCAAA | | |
| GAATACGTAAATAATTAATAGTAGTGATTTTCCTAACTTTATTTAG | | |
| TCAAAAAATTAGCCTTTTAATTCTGCTGTAACCCGTACATGCCCAA | | |
| AATAGGGGGCGGGTTACACAGAATATATAACATCGTAGGTGTCTGG | | |
| GTGAACAGTTTATTCCTGGCATCCACTAAATATAATGGAGCCCGCT | | |
| TTTTAAGCTGGCATCCAGAAAAAAAAAGAATCCCAGCACCAAAATA | | |
| TTGTTTTCTTCACCAACCATCAGTTCATAGGTCCATTCTCTTAGCG | | |
| CAACTACAGAGAACAGGGGCACAAACAGGCAAAAAACGGGCACAAC | | |
| CTCAATGGAGTGATGCAACCTGCCTGGAGTAAATGATGACACAAGG | | |
| CAATTGACCCACGCATGTATCTATCTCATTTTCTTACACCTTCTAT | | |
| TACCTTCTGCTCTCTCTGATTTGGAAAAAGCTGAAAAAAAAGGTTG | | |
| AAACCAGTTCCCTGAAATTATTCCCCTACTTGACTAATAAGTATAT | | |
| AAAGACGGTAGGTATTGATTGTAATTCTGTAAATCTATTTCTTAAA | | |
| CTTCTTAAATTCTACTTTTATAGTTAGTCTTTTTTTTAGTTTTAAA | | |
| ACACCAAGAACTTAGTTTCGAATAAACACACATAAACAAACAAAAT | | |
| GGAAAGTTCTGGGGTGCCTGTGATCACATTGTCCTCAGGTAAAGTA | | |
| ATGCCCGTACTGGGCATGGGAACCTTCGAAAAGGTGGGTAAGGGGT | | |
| CTGAACGTGAGCGTTTAGCCATTCTTAAAGCGATCGAAGTTGGTTA | | |
| CCGTTACTTTGATACCGCAGCGGCATATGAAACGGAAGAAGTTCTA | | |
| GGGGAAGCCATTGCTGAAGCTTTACAATTGGGTCTGATAGAGAGCC | | |
| GTGACGAGCTGTTCATCAGCTCAATGCTTTGGTGCACCGACGCACA | | |
| TCCAGACCGTGTGCTACTTGCTCTGCAAAACAGTCTGAGAAATCTA | | |
| AAACTTGAATATCTAGACCTATATATGTTGCCGTTTCCTGCCAGCC | | |
| TTAAGCCGGGCAAAATTACGATGGATATTCCTGAGGAGGATATTTG | | |
| CCGTATGGATTATCGTTCAGTCTGGAGCGCCATGGAAGAGTGTCAA | | |
| AACTTAGGATTTACTAAAAGTATTGGTGTAAGCAACTTTTCTTGCA | | |
| AGAAATTACAAGAATTAATGGCCACTGCAAATATCCCGCCCGCGGT | | |
| AAATCAAGTAGAGATGTCACCAGCTTTCCAACAGAAAAAACTGAGG | | |
| GAATATTGTAACGCAAACAACATATTGGTATCCGCAGTAAGCATTC | | |
| TGGGATCAAACGGGACGCCCTGGGGTAGTAATGCTGTTCTTGGAAG | | |
| CGAAGTTTTGAAACAGATCGCGATGGCGAAAGGCAAAAGCGTTGCG | | |
| CAAGTCAGTATGAGGTGGGTCTATGAGCAGGGCGCGTCTTTAGTAG | | |
| TCAAGAGTTTCTCTGAAGAACGTTTAAGAGAAAACCTGAATATTTT | | |
| TGACTGGGAGCTTACGAAAGAAGACAATGAGAAGATAGGCGAAATC | | |
| CCGCAATGTAGAATCCTTACTGCGTACTTCCTTGTCTCCCCGAACG | | |
| GCCCGTTTAAATCTCAGGAAGAGCTTTGGGATGACAAGGCAtaaAC | | |
| AGGCCCCTTTTCCTTTGTCGATATCATGTAATTAGTTATGTCACGC | | |
| TTACATTCACGCCCTCCTCCCACATCCGCTCTAACCGAAAAGGAAG | | |
| GAGTTAGACAACCTGAAGTCTAGGTCCCTATTTATTTTTTTTAATA | | |
| GTTATGTTAGTATTAAGAACGTTATTTATATTTCAAATTTTTCTTT | | |
| TTTTTCTGTACAAACGCGTGTACGCATGTAACATTATACTGAAAAC | | |
| CTTGCTTGAGAAGGTTTTGGGACGCTCGAAGGCTTTAATTTGTAAT | | |
| CATTATCACTTTACGGGTCCTTTCCGGTGATCCGACAGGTTACGGG | | |
| GCGGCGACCTCGCGGGTTTTCGCTATTTATGAAAATTTTCCGGTTT | | |
| AAGGCGTTTCCGTTCTTCTTCGTCATAACTTAATGTTTTTATTTAA | | |
| AATACCTCGCGAGTGGCAACACTGAAAATACCCATGGAGCGGCGTA | | |
| ACCGTCGCACAGgatctaggtgaagatcctttttgataatctcatg | | |
| accaaaatcccttaacgtgagttttcgaccactgagcgtcagaccc | | |
| cgtagaaaagatcaaaggatcttcttgagatcctttttttctgcgc | | |
| gtaatctgctgcttgcaaacaaaaaaaccaccgctaccagcggtgg | | |
| tttgtttgccggatcaagagctaccaactctttttccgaaggtaac | | |
| tggcttcagcagagcgcagataccaaatactgtccttctagtgtag | | |
| ccgtagttaggccaccacttcaagaactctgtagcaccgcctacat | | |
| acctcgctctgctaatcctgttaccagtggctgctgccagtggcga | | |
| taagtcgtgtcttaccgggttggactcaagacgatagttaccggat | | |
| aaggcgcagcggtcgggctgaacggggggttcgtgcacacagccca | | |
| gcttggagcgaacgacctacaccgaactgagatacctacagcgtga | | |
| gctatgagaaagcgccacgcttcccgaagggagaaaggcggacagg | | |
| tatccggtaagcggcagggtcggaacaggagagcgcacgagggagc | | |
| ttccagggggaaacgcctggtatctttatagtcctgtcgggtttcg | | |
| ccacctctgacttgagcgtcgatttttgtgatgctcgtcagggggg | | |
| cggagcctatggaaaaacgccagcaacgcggcagtggaacgTGCAT | | |
| TATGAATTAGTTACGCTAGGGATAACAGGGTAATATAGAACCCGAA | | |
| CGACCGAGCGCAGCGGCGGCCGCGCTGATACCGCCGC | | |
| CCTCGCCGCAGTTAATTAAAGTCAGTGAGCGAGGAAGCGCGTAACT | pJL35 | SEQ. ID |
| ATAACGGTCCTAAGGTAGCGAATCCTGATGCGGTATTTTCTCCTTA | | NO. 29 |
| CGCATCTGTGCGGTATTTCACACCGCATAGATCGGCAAGTGCACAA | | |
| ACAATACTTAAATAAATACTACTCAGTAATAACCTATTTCTTAGCA | | |
| TTTTTGACGAAATTTGCTATTTTGTTAGAGTCTTTTACACCATTTG | | |
| TCTCCACACCTCCGCTTACATCAACACCAATAACGCCATTTAATCT | | |
| AAGCGCATCACCAACATTTTCTGGCGTCAGTCCACCAGCTAACATA | | |
| AAATGTAAGCTTTCGGGGCTCTCTTGCCTTCCAACCCAGTCAGAAA | | |
| TCGAGTTCCAATCCAAAAGTTCACCTGTCCCACCTGCTTCTGAATC | | |
| AAACAAGGGAATAAACGAATGAGGTTTCTGTGAAGCTGCACTGAGT | | |
| AGTATGTTGCAGTCTTTTGGAAATACGAGTCTTTTAATAACTGGCA | | |
| AACCGAGGAACTCTTGGTATTCTTGCCACGACTCATCTCCATGCAG | | |
| TTGGACGATATCAATGCCGTAATCATTGACCAGAGCCAAAACATCC | | |
| TCCTTAAGTTGATTACGAAACACGCCAACCAAGTATTTCGGAGTGC | | |
| CTGAACTATTTTTATATGCTTTTACAAGACTTGAAATTTTCCTTGC | | |
| AATAACCGGGTCAATTGTTCTCTTTCTATTGGGCACACATATAATA | | |
| CCCAGCAAGTCAGCATCGGAATCTAGAGCACATTCTGCGGCCTCTG | | |
| TGCTCTGCAAGCCGCAAACTTTCACCAATGGACCAGAACTACCTGT | | |
| GAAATTAATAACAGACATACTCCAAGCTGCCTTTGTGTGCTTAATC | | |
| ACGTATACTCACGTGCTCAATAGTCACCAATGCCCTCCCTCTTGGC | | |
| CCTCTCCTTTTCTTTTTTCGACCGAATTAATTCTTAATCGGCAAAA | | |
| AAAGAAAAGCTCCGGATCAAGATTGTACGTAAGGTGACAAGCTATT | | |
| TTTCAATAAAGAATATCTTCCACTACTGCCATCTGGCGTCATAACT | | |
| GCAAAGTACACATATATTACGATGCTGTTCTATTAAATGCTTCCTA | | |
| TATTATATATATAGTAATGTCGTGATCTATGGTGCACTCTCAGTAC | | |
| AATCTGCTCTGATGCCGCATAGTTAAGCCAGCCCCGACACCCGCCA | | |
| ACACCCGCTGACGCGCCCTGACGGGCTTGTCTGCTCCCGGCATCCG | | |
| CTTACAGACAAGCTGTGACCGTCTCCGGGAGCTGCATGTGTCAGAG | | |
| GTTTTCACCGTCATCACCGAAACGCGCGAGACGAAAGGGCCTCGTG | | |
| ATACGCCTATTTTTATAGGTTAATGTCATGATAATAATGGTTTCTT | | |
| AGACGGATCGCTTGCCTGTAACTTACACGCGCCTCGTATCTTTTAA | | |
| TGATGGAATAATTTGGGAATTTACTCTGTGTTTATTTATTTTTATG | | |
| TTTTGTATTTGGATTTTAGAAAGTAAATAAAGAAGGTAGAAGAGTT | | |
| ACGGAATGAAGAAAAAAAAATAAACAAAGGTTTAAAAAATTTCAAC | | |
| AAAAAGCGTACTTTACATATATATTTATTAGACAAGAAAAGCAGAT | | |
| TAAATAGATATACATTCGATTAACGATAAGTAAAATGTAAAATCAC | | |
| AGGATTTTCGTGTGTGGTCTTCTACACAGACAAGGTGAAACAATTC | | |
| GGCATTAATACCTGAGAGCAGGAAGAGCAAGATAAAAGGTAGTATT | | |
| TGTTGGCGATCCCCCTAGAGTCTTTTACATCTTCGGAAAACAAAAA | | |
| CTATTTTTTCTTTAATTTCTTTTTTTACTTTCTATTTTTAATTTAT | | |
| ATATTTATATTAAAAAATTTAAATTATAATTATTTTTATAGCACGT | | |
| GATGAAAAGGACCCAGGTGGCACTTTTCGGGGAAATGTGCGCGGAA | | |
| CCCCTATTTGTTTATTTTTCTAAATACATTCAAATATGTATCCGCT | | |
| CATGAGACAATAACCCTGATAAATGCTTCAATAATATTGAAAAAGG | | |
| AAGAGTATGAGTATTCAACATTTCCGTGTCGCCCTTATTCCCTTTT | | |
| TTGCGGCATTTTGCCTTCCTGTTTTTGCTCACCCAGAAACGCTGGT | | |
| GAAAGTAAAAGATGCTGAAGATCAGTTGGGACGCGTAGTCTAGACC | | |
| AGCCAGGACAGAAATGCCTCGACTTCGCTGCTACCCAAGGTTGCCG | | |
| GGTGACGCACACCGTGGAAACGGATGAAGGCACGAACCCAGTGGAC | | |
| ATAAGCCTGTTCGGTTCGTAAGCTGTAATGCAAGTAGCGTATGCGC | | |
| TCACGCAACTGGTCCAGAACCTTGACCGAACGCAGCGGTGGTAACG | | |
| GCGCAGTGGCGGTTTTCATGGCTTGTTATGACTGTTTTTTTGGGGT | | |
| ACAGTCTATGCCTCGGGCATCCAAGCAGCAAGCGCGTTACGCCGTG | | |
| GGTCGATGTTTGATGTTATGGAGCAGCAACGATGTTACGCAGCAGG | | |
| GCAGTCGCCCTAAAACAAAGTTAAACATTATGAGGGAAGCGGTGAT | | |
| CGCCGAAGTATCGACTCAACTATCAGAGGTAGTTGGCGCCATCGAG | | |
| CGCCATCTCGAACCGACGTTGCTGGCCGTACATTTGTACGGCTCCG | | |
| CAGTGGATGGCGGCCTGAAGCCACACAGTGATATTGATTTGCTGGT | | |
| TACGGTGACCGTAAGGCTTGATGAAACAACGCGGCGAGCTTTGATC | | |
| AACGACCTTTTGGAAACTTCGGCTTCCCCTGGAGAGAGCGAGATTC | | |
| TCCGCGCTGTAGAAGTCACCATTGTTGTGCACGACGACATCATTCC | | |
| GTGGCGTTATCCAGCTAAGCGCGAACTGCAATTTGGAGAATGGCAG | | |
| CGCAATGACATTCTTGCAGGTATCTTCGAGCCAGCCACGATCGACA | | |
| TTGATCTGGCTATCTTGCTGACAAAAGCAAGAGAACATAGCGTTGC | | |
| CTTGGTAGGTCCAGCGGCGGAGGAACTCTTTGATCCGGTTCCTGAA | | |
| CAGGATCTATTTGAGGCGCTAAATGAAACCTTAACGCTATGGAACT | | |
| CGCCGCCCGACTGGGCTGGCGATGAGCGAAATGTAGTGCTTACGTT | | |
| GTCCCGCATTTGGTACAGCGCAGTAACCGGCAAAATCGCGCCGAAG | | |
| GATGTCGCTGCCGGCTGGGCAATGGAGCGCCTGCCGGCCCAGTATC | | |
| AGCCCGTCATACTTGAAGCTAGACAGGCTTATCTTGGACAAGAAGA | | |
| AGATCGCTTGGCCTCGCGCGCAGATCAGTTGGAAGAATTTGTCCAC | | |
| TACGTGAAAGGCGAGATCACCAAGGTAGTCGGCAAATAACCCTCGA | | |
| GCATTCAAGGCGCCTTGATTATTTGACGTGGTTTGATGGCCTCCAC | | |
| GCACGTTGTGATATGTAGATGATTCAGTTCGAGTTTATCATTATCA | | |
| ATACTGCCATTTCAAAGAATACGTAAATAATTAATAGTAGTGATTT | | |
| TCCTAACTTTATTTAGTCAAAAAATTAGCCTTTTAATTCTGCTGTA | | |
| ACCCGTACATGCCCAAAATAGGGGGCGGGTTACACAGAATATATAA | | |
| CATCGTAGGTGTCTGGGTGAACAGTTTATTCCTGGCATCCACTAAA | | |
| TATAATGGAGCCCGCTTTTTAAGCTGGCATCCAGAAAAAAAAAGAA | | |
| TCCCAGCACCAAAATATTGTTTTCTTCACCAACCATCAGTTCATAG | | |
| GTCCATTCTCTTAGCGCAACTACAGAGAACAGGGGCACAAACAGGC | | |
| AAAAAACGGGCACAACCTCAATGGAGTGATGCAACCTGCCTGGAGT | | |
| AAATGATGACACAAGGCAATTGACCCACGCATGTATCTATCTCATT | | |
| TTCTTACACCTTCTATTACCTTCTGCTCTCTCTGATTTGGAAAAAG | | |
| CTGAAAAAAAAGGTTGAAACCAGTTCCCTGAAATTATTCCCCTACT | | |
| TGACTAATAAGTATATAAAGACGGTAGGTATTGATTGTAATTCTGT | | |
| AAATCTATTTCTTAAACTTCTTAAATTCTACTTTTATAGTTAGTCT | | |
| TTTTTTTAGTTTTAAAACACCAAGAACTTAGTTTCGAATAAACACA | | |
| CATAAACAAACAAAATGGAACTTCAGTACTTCTCCTATTTTCAACC | | |
| CACTTCATCTGTCGTAGCCCTACTACTAGCACTAGTGAGTATTTTA | | |
| TTTAGCGTAGTTGTTTTGAGGAAGACTTTCAGTAACAATTACTCCA | | |
| GCCCCGCGTCAAGTACGGAAACCGCTGTGCTGTGTCATCAGAGGCA | | |
| ACAGAGTTGCGCCCTACCTATCAGCGGCCTTCTTCACGTGTTCATG | | |
| AATAAGAACGGCCTGATTCATGTCACCTTGGGAAATATGGCTGACA | | |
| AATATGGCCCTATCTTCAGTTTTCCGACAGGCAGCCACCGTACTTT | | |
| AGTAGTCAGTTCCTGGGAAATGGTGAAAGAGTGTTTCACCGGTAAT | | |
| AACGACACGGCATTCTCCAACAGACCAATCCCTTTGGCTTTTCAAA | | |
| CCATATTCTACGCCTGTGGCGGCATTGATTCTTACGGTTTAAGTAG | | |
| TGTCCCGTATGGTAAATACTGGAGGGAGTTGAGAAAGGTGTGTGTT | | |
| CACAACCTGCTGAGTAATCAGCAATTGCTGAAGTTCAGACATCTTA | | |
| TAATCTCCCAAGTGGATACGTCTTTTAACAAGTTGTATGAGCTGTG | | |
| TAAGAACTCTGAAGATAATCAAGGTATGGTAAGGATGGATGATTGG | | |
| CTAGCTCAACTTTCCTTTAACGTCATCGGTAGGATCGTTTGCGGAT | | |
| TCCAGTCTGACCCAAAGACGGGTGCACCTTCAAGGGTAGAACAGTT | | |
| TAAGGAAGTCATAAATGAGGCGTCATATTTTATGTCAACAAGTCCA | | |
| GTCTCCGATAACGTACCAATGTTGGGATGGATCGACCAATTGACCG | | |
| GTCTGACGAGGAACATGAAGCATTGTGGGAAGAAGCTTGACTTAGT | | |
| AGTGGAGTCAATTATCAAGGACCATAGGCAAAAGAGACGTTTTTCA | | |
| CGTACAAAAGGTGGCGATGAGAAGGATGACGAACAGGACGACTTTA | | |
| TTGATATTTGCTTGAGCATCATGGAGCAGCCACAGTTGCCCGGGAA | | |
| CAATTCTCCCCCTCAAATTCCGATCAAATCTATCGTGCTAGACATG | | |
| ATTGGGGGTGGTACCGACACTACGAAACTTACAACCATATGGACCC | | |
| TATCACTTTTGTTGAACAATCCTCACGTGTTAGATAAAGCTAAACA | | |
| AGAGGTCGACGCTCACTTTCGTAAAAAGAGAAGATCAACAGATGAC | | |
| GCAGCAGCGGCAGTCGTTGATTTTGACGACATAAGAAATTTAGTAT | | |
| ACATCCAAGCCATCATTAAAGAAAGTATGAGGCTTTATCCAGCCAG | | |
| CCCGGTGGTTGAGCGTCTTTCCGGCGAGGATTGCGTTGTTGGAGGT | | |
| TTTCACGTGCCTGCTGGTACGAGACTATGGGCTAACGTTTGGAAGA | | |
| TGCAAAGAGATCCCAAAGTTTGGGACGATCCTCTAGTATTCAGACC | | |
| TGAAAGGTTTTTGAGCGACGAGCAAAAGATGGTAGACGTTCGTGGC | | |
| CAAAACTATGAACTTCTGCCATTCGGCGCAGGAAGAAGAATCTGTC | | |
| CAGGCGTTTCCTTTAGTCTTGACCTTATGCAACTTGTCCTAACCAG | | |
| GTTAATCCTAGAGTTCGAAATGAAGTCCCCGTCCGGCAAGGTAGAT | | |
| ATGACCGCAACTCCAGGACTAATGTCTTACAAGGTGGTTCCATTGG | | |
| ACATATTGCTGACTCACCGTCGTATCAAGTCATGCGTTCAATTGGC | | |
| GTCTTCTGAACGTGATtaaGCGAATTTCTTATGATTTATGATTTTT | | |
| ATTATTAAATAAGTTATAAAAAAAATAAGTGTATACAAATTTTAAA | | |
| GTGACTCTTAGGTTTTAAAACGAAAATTCTTATTCTTGAGTAACTC | | |
| TTTCCTGTAGGTCAGGTTGCTTTCTCAGGTAGAGCGTTGGTTGGTG | | |
| GATCAAGCCCACGCGTAGGCAATCCTCGAGCAGATCCGCCAGGCGT | | |
| GTATATATAGCGTGGATGGCCAGGCAACTTTAGTGCTGACACATAC | | |
| AGGCATATATATATGTGTGCGACAACACATGATCATATGGCATGCA | | |
| TGTGCTCTGTATGTATATAAAACTCTTGTTTTCTTCTTTTCTCTAA | | |
| ATATTCTTTCCTTATACATTAGGACCTTTGCAGCATAAATTACTAT | | |
| ACTTCTATAGACACACAAACACAAATACACACACTAAATTAATAAT | | |
| GGAAAGTTCTGGGGTGCCTGTGATCACATTGTCCTCAGGTAAAGTA | | |
| ATGCCCGTACTGGGCATGGGAACCTTCGAAAAGGTGGGTAAGGGGT | | |
| CTGAACGTGAGCGTTTAGCCATTCTTAAAGCGATCGAAGTTGGTTA | | |
| CCGTTACTTTGATACCGCAGCGGCATATGAAACGGAAGAAGTTCTA | | |
| GGGGAAGCCATTGCTGAAGCTTTACAATTGGGTCTGATAGAGAGCC | | |
| GTGACGAGCTGTTCATCAGCTCAATGCTTTGGTGCACCGACGCACA | | |
| TCCAGACCGTGTGCTACTTGCTCTGCAAAACAGTCTGAGAAATCTA | | |
| AAACTTGAATATCTAGACCTATATATGTTGCCGTTTCCTGCCAGCC | | |
| TTAAGCCGGGCAAAATTACGATGGATATTCCTGAGGAGGATATTTG | | |
| CCGTATGGATTATCGTTCAGTCTGGAGCGCCATGGAAGAGTGTCAA | | |
| AACTTAGGATTTACTAAAAGTATTGGTGTAAGCAACTTTTCTTGCA | | |
| AGAAATTACAAGAATTAATGGCCACTGCAAATATCCCGCCCGCGGT | | |
| AAATCAAGTAGAGATGTCACCAGCTTTCCAACAGAAAAAACTGAGG | | |
| GAATATTGTAACGCAAACAACATATTGGTATCCGCAGTAAGCATTC | | |
| TGGGATCAAACGGGACGCCCTGGGGTAGTAATGCTGTTCTTGGAAG | | |
| CGAAGTTTTGAAACAGATCGCGATGGCGAAAGGCAAAAGCGTTGCG | | |
| CAAGTCAGTATGAGGTGGGTCTATGAGCAGGGCGCGTCTTTAGTAG | | |
| TCAAGAGTTTCTCTGAAGAACGTTTAAGAGAAAACCTGAATATTTT | | |
| TGACTGGGAGCTTACGAAAGAAGACAATGAGAAGATAGGCGAAATC | | |
| CCGCAATGTAGAATCCTTACTGCGTACTTCCTTGTCTCCCCGAACG | | |
| GCCCGTTTAAATCTCAGGAAGAGCTTTGGGATGACAAGGCAtaaAC | | |
| AGGCCCCTTTTCCTTTGTCGATATCATGTAATTAGTTATGTCACGC | | |
| TTACATTCACGCCCTCCTCCCACATCCGCTCTAACCGAAAAGGAAG | | |
| GAGTTAGACAACCTGAAGTCTAGGTCCCTATTTATTTTTTTTAATA | | |
| GTTATGTTAGTATTAAGAACGTTATTTATATTTCAAATTTTTCTTT | | |
| TTTTTCTGTACAAACGCGTGTACGCATGTAACATTATACTGAAAAC | | |
| CTTGCTTGAGAAGGTTTTGGGACGCTCGAAGGCTTTAATTTGTAAT | | |
| CATTATCACTTTACGGGTCCTTTCCGGTGATCCGACAGGTTACGGG | | |
| GCGGCGACCTCGCGGGTTTTCGCTATTTATGAAAATTTTCCGGTTT | | |
| AAGGCGTTTCCGTTCTTCTTCGTCATAACTTAATGTTTTTATTTAA | | |
| AATACCTCGCGAGTGGCAACACTGAAAATACCCATGGAGCGGCGTA | | |
| ACCGTCGCACAGgatctaggtgaagatcctttttgataatctcatg | | |
| accaaaatcccttaacgtgagttttcgaccactgagcgtcagaccc | | |
| cgtagaaaagatcaaaggatcttcttgagatccttttttttgcgcg | | |
| taatctgctgcttgcaaacaaaaaaaccaccgctaccagcggtggt | | |
| ttgtttgccggatcaagagctaccaactctttttccgaaggtaact | | |
| ggcttcagcagagcgcagataccaaatactgtccttctagtgtagc | | |
| cgtagttaggccaccacttcaagaactctgtagcaccgcctacata | | |
| cctcgctctgctaatcctgttaccagtggctgctgccagtggcgat | | |
| aagtcgtgtcttaccgggttggactcaagacgatagttaccggata | | |
| aggcgcagcggtcgggctgaacggggggttcgtgcacacagcccag | | |
| cttggagcgaacgacctacaccgaactgagatacctacagcgtgag | | |
| ctatgagaaagcgccacgcttcccgaagggagaaaggcggacaggt | | |
| atccggtaagcggcagggtcggaacaggagagcgcacgagggagct | | |
| tccagggggaaacgcctggtatctttatagtcctgtcgggtttcgc | | |
| cacctctgacttgagcgtcgatttttgtgatgctcgtcaggggggc | | |
| ggagcctatggaaaaacgccagcaacgcggcagtggaacgTGCATT | | |
| ATGAATTAGTTACGCTAGGGATAACAGGGTAATATAGAACCCGAAC | | |
| GACCGAGCGCAGCGGCGGCCGCGCTGATACCGCCGC | | |

### Morphinan Alkaloid Generating Modifications

[0149] Some methods, processes, and systems provided herein describe the conversion of promorphinan alkaloids to morphinan alkaloids. Some of the methods, processes, and systems describe the conversion of a tetracyclic scaffold to a pentacyclic scaffold (FIG. 4). Some of the methods, processes, and systems may comprise an engineered host cell. In some examples, the production of pentacyclic thebaine, or a morphinan alkaloid, from a tetracyclic precursor, or a promorphinan alkaloid is described. In some examples, the conversion of promorphinan alkaloids to thebaine are key steps in the conversion of a substrate to a diverse range of benzylisoquinoline alkaloids.

[0150] In some examples, the tetracyclic precursor may be salutaridine, salutaridinol, or salutaridinol-7-O-acetate. The tetracyclic precursor may be converted to pentacyclic thebaine by closure of an oxide bridge between C-4 and C-5. In some examples, the tetracyclic precursor salutaridine may be prepared for ring closure by stepwise hydroxylation and O-acetylation at C-7. Ring closure may be activated by elimination of an acetate leaving group. In some examples, the allylic elimination and oxide ring closure that generates thebaine occurs spontaneously. In other examples, the ring closure reaction that generates pentacyclic thebaine is promoted by factors such as pH or solvent. In other examples, the thebaine-generating ring closure reaction is promoted by contact with a protein or enzyme. These conversion steps are provided in FIG. 4 and represented generally in Scheme 2. R₁, R₂, and R₃ may be H or CH₃. R₄ may be CH₃, CH₃CH₂, CH₃CH₂CH₂, or other appropriate alkyl group. In some cases, R₁, R₂, R₃, and R₄ may be CH₃ as provided in FIG. 4.

[chemical structure]

[0151] In some examples, the first enzyme that prepares the tetracyclic precursor is salutaridine reductase (SalR). In some cases, SalR hydroxylates the substrate salutaridine at the C-7 position (see Formula III). The product of this reaction may be one or more salutaridinol epimers. In some examples, the product is (7S)-salutaridinol. In some examples, the salutaridine reductase may catalyze the reduction reaction within a host cell, such as an engineered host cell, as described herein.

[0152] In some examples, the second enzyme that prepares the tetracyclic precursor is salutaridinol 7-O-acetyltransferase (SalAT). In some cases, SalAT transfers the acetyl from acetyl-CoA to the 7-OH of salutaridinol (see Formula IV). In other cases, SalAT may utilize a novel cofactor such as n-propionyl-CoA and transfer the propionyl to the 7-OH of salutaridinol. In some examples, the product of SalAT is (7S)-salutaridinol-7-O-acetate. In some examples, the salutaridinol 7-O-acetyltransferase may catalyze the acetyl transfer reaction within a host cell, such as an engineered host cell, as described herein.

[0153] In some examples, the tetracyclic precursor of thebaine is (7S)-salutaridinol-7-O-acetate. In some examples (7S)-salutaridinol-7-O-acetate is unstable and spontaneously eliminates the acetate at C-7 and closes the oxide bridge between C-4 and C-5 to form thebaine (see Formula V). In some examples, the rate of elimination of the acetate leaving group is promoted by pH. In some examples, the allylic elimination and oxide bridge closure is catalyzed by an enzyme with thebaine synthase activity, or a thebaine synthase. In some examples, this enzyme is a Bet v 1-fold protein. In some examples, this enzyme is an engineered thebaine synthase, an engineered SalAT, a dirigent (DIR) protein, or a chalcone isomerase (CHI). In some examples, the enzyme encoding thebaine synthase activity may catalyze the ring closure reaction within a host cell, such as an engineered host cell, as described herein.

[0154] In some examples, the salutaridine reductase enzyme may be SalR or a SalR-like enzyme from plants in the Ranunculales order that biosynthesize thebaine, for example Papaver somniferum. In other examples, the enzyme with salutaridine reductase activity may be from mammals or any other vertebrate or invertebrate that biosynthesizes endogenous morphine.

[0155] In some examples, the salutaridinol 7-O-acetyltransferase enzyme may be SalAT or a SalAT-like enzyme from plants in the Ranunculales order that biosynthesize thebaine, for example P. somniferum. In other examples, the enzyme with salutaridinol 7-O-acetyltransferase activity may be from mammals or any other vertebrate or invertebrate that biosynthesizes endogenous morphine.

[0156] In some examples, the thebaine synthase (TS) enzyme may be a Bet v 1 fold protein from plants in the Ranunculales order that biosynthesize thebaine, for example P. somniferum. In some examples, the Bet v 1 protein includes the following domains in order from the N-terminus to C-terminus: a β-strand, one or two α-helices, six β-strands, and one or two α-helices. The protein is organized such that it has a Bet v 1 fold and an active site that accepts large, bulky, hydrophobic molecules, such as morphinan alkaloids. This protein may be any plant Bet v 1 protein, pathogenesis-related 10 protein (PR-10), a major latex protein (MLP), fruit or pollen allergen, plant hormone binding protein (e.g., binding to cytokinin or brassinosteroids), plant polyketide cyclase-like protein, or norcoclaurine synthase (NCS)-related protein that has a Bet v 1 fold. Other non-plant examples of the Bet v 1 fold protein are polyketide cyclases, activator of Hsp90 ATPase homolog 1 (AHA1) proteins, SMU440-like proteins (e.g., from Streptococcus mutans), PA1206-related proteins (e.g., from Pseudomonas aeruginosa), CalC calicheamicin resistance protein (e.g., from Micromonospora echinospora), and the CoxG protein from carbon monoxide metabolizing Oligotropha carboxidovorans. Further examples from Bet v 1-related families include START lipid transfer proteins, phosphatidylinositol transfer proteins, and ring hydroxylases.

[0157] In some examples, the thebaine synthase enzyme may be a dirigent protein from plants in the Ranunculales order that biosynthesize thebaine, for example P. somniferum. In other examples, the enzyme may be any dirigent protein from plants.

[0158] In some examples, the thebaine synthase enzyme may be a chalcone isomerase protein from plants in the Ranunculales order that biosynthesize thebaine, for example P. somniferum. In other examples, the enzyme may be any chalcone isomerase protein from plants.

[0159] In some examples, the thebaine synthase enzyme may be a SalAT-like enzyme from plants in the Ranunculales order that biosynthesize thebaine, for example P. somniferum. In other examples, the enzyme may be any SalAT-like protein from plants.

[0160] In some examples, the enzyme with thebaine synthase activity may be from mammals or any other vertebrate or invertebrate that biosynthesizes endogenous morphine.

[0161] In some examples, combinations of the above enzymes together with additional accessory proteins may function to convert various tetracyclic precursors into thebaine. In some examples, these enzymes catalyze the reactions within a host cell, such as an engineered host cell, as described herein.

[0162] Examples of amino acid sequences for thebaine synthase activity are set forth in Table 2. An amino acid sequence for a thebaine synthase that is utilized in a tetracyclic precursor to thebaine may be 50% or more identical to a given amino acid sequence as listed in Table 2. For example, an amino acid sequence for such a thebaine synthase may comprise an amino acid sequence that is at least 50% or more, 55% or more, 60% or more, 65% or more, 70% or more, 75% or more, 80% or more, 81% or more, 82% or more, 83% or more, 84% or more, 85% or more, 86% or more, 87% or more, 88% or more, 89% or more, 90% or more, 91% or more, 92% or more, 93% or more, 94% or more, 95% or more, 96% or more, 97% or more, 98% or more, or 99% or more identical to an amino acid sequence as provided herein. Additionally, in certain embodiments, an “identical” amino acid sequence contains at least 80%-99% identity at the amino acid level to the specific amino acid sequence. In some cases an “identical” amino acid sequence contains at least about 85%, 86%, 87%, 88%, 89%, 90%, 91%, 92%, 93%, 94% and more in certain cases, at least 95%, 96%, 97%, 98% and 99% identity, at the amino acid level. In some cases, the amino acid sequence may be identical but the DNA sequence is altered such as to optimize codon usage for the host organism, for example.

[0163] An engineered host cell may be provided that produces a salutaridine reductase, salutaridinol 7-O-acetyltransferase, and thebaine synthase that converts a tetracyclic precursor into thebaine, wherein the thebaine synthase comprises an amino acid sequence selected from the group consisting of SEQ ID NOs: 30, 31, 32, 33, 34, 35, 36, and 37. In some cases, the thebaine synthase may form a fusion protein with other enzymes. The enzymes that are produced within the engineered host cell may be recovered and purified so as to form a biocatalyst. These one or more enzymes may also be used to catalyze the conversion of a tetracyclic promorphinan precursor to thebaine.

[0164] In other examples, the thebaine synthase comprises an amino acid sequence selected from the group consisting of SEQ ID NOs: 38, 39, 40, 41, 42, 43, 44, 45, 46, 47, 48, 49, 50, 51, 52, 53, 54, 55, 56, 57, 58, 59, 60, and 61.

[0165] In additional cases, the one or more enzymes that are recovered from the engineered host cell may be used in a process for converting a tetracyclic promorphinan precursor to a thebaine. The process may include contacting the tetracyclic promorphinan precursor with the recovered enzymes in an amount sufficient to convert said tetracyclic promorphinan precursor to thebaine. In some examples, the tetracyclic promorphinan precursor may be contacted with a sufficient amount of the one or more enzymes such that at least 5% of said tetracyclic promorphinan precursor is converted to thebaine. In further examples, the tetracyclic promorphinan precursor may be contacted with a sufficient amount of the one or more enzymes such that at least 10%, at least 15%, at least 20%, at least 25%, at least 30%, at least 35%, at least 40%, at least 45%, at least 50%, at least 55%, at least 60%, at least 65%, at least 70%, at least 80%, at least 82%, at least 84%, at least 86%, at least 88%, at least 90%, at least 91%, at least 92%, at least 93%, at least 94%, at least 95%, at least 96%, at least 97%, at least 98%, at least 99%, at least 99.5%, at least 99.7%, or 100% of said tetracyclic promorphinan precursor is converted to thebaine.

[0166] In some examples, process conditions are implemented to support the formation of thebaine in engineered host cells. In some cases, engineered host cells are grown at pH 3.3, and once high cell density is reached the pH is adjusted to pH 8.0 to support continued production of thebaine at higher pH. In some cases, the engineered host cells produce additional enzymes to convert sugar and other simple precursors, such as tyrosine, to thebaine. In some cases, the SalAT enzyme has been engineered to exhibit higher activity at pH 8.0 and is expressed from a late stage promoter.

[0167] In some examples, one or more of the enzymes converting a tetracyclic promorphinan precursor to a thebaine are localized to cellular compartments. In some examples, SalR, SalAT, and thebaine synthase (TS) may be modified such that they encode targeting sequences that localize them to the endoplasmic reticulum membrane of the engineered host cell. In particular, in certain instances, the host cell may be engineered to increase production of salutaridinol or thebaine or products for which thebaine is a precursor from reticuline or its precursors by localizing TS and/or SalR and/or SalAT to organelles in the yeast cell. TS and/or SalR and/or SalAT may be localized to the yeast endoplasmic reticulum in order to decrease the spatial distance between TS and/or SalR and/or SalAT and CYP2D2 or CYP2D6 or SalSyn or an engineered cytochrome P450 enzyme that catalyzes the conversion of reticuline to salutaridine. By increased production is meant both the production of some amount of the compound of interest where the control has no production of the compound of interest, as well as an increase of 10% or more, such as 50% or more, including 2-fold or more, e.g., 5-fold or more, such as 10-fold or more in situations where the control has some production of the compound of interest.

[0168] In other examples, SalAT and TS may be co-localized in to a single protein fusion. In some examples, the fusion is created between SalAT and TS by one of several methods, including, direct fusion, co-localization to a yeast organelle, or by enzyme co-localization tools such as leucine zippers, protein scaffolds that utilize adaptor domains, or RNA scaffolds that utilize aptamers. Co-localizing the thebaine synthesis enzyme may facilitate substrate channeling between the active sites of the enzymes and limit the diffusion of unstable intermediates such as salutaridinol-7-O-acetate.

[0169] In some examples, an engineered salutaridinol 7-O-acetyltransferase (SalAT) enzyme is used in converting a tetracyclic promorphinan precursor to a thebaine. In some examples, a SalAT enzyme is engineered to combine two functions: (1) the transfer of an acyl group from acetyl-CoA to the 7-OH of salutaridinol, and (2) the subsequent elimination of the acetyl group and closure of an oxide bridge between carbons C4 and C5 to form thebaine.

[0170] In some examples, an enzyme with salutaridinol 7-O-acetyltransferase activity is fused to a peptide with a Bet v 1 fold. In some examples, salutaridinol 7-O-acetyltransferase enzyme and the Bet v 1 fold protein may be fused in any order from N-terminus to C-terminus, C-terminus to N-terminus, N-terminus to N-terminus, or C-terminus to C-terminus. In some examples, the two protein sequences may be fused directly or fused through a peptide linker region.

[0171] In some examples, an enzyme with salutaridinol 7-O-acetyltransferase activity is fused to a peptide with a Bet v 1 fold by circular permutation. In some cases, the N- and C-termini of SalAT are fused and the Bet v 1 sequence is then inserted randomly within this sequence. In some cases, the resulting fusion protein library is screened for thebaine production. In other cases, a circular permutation SalAT library is first screened for activity in the absence of Bet v 1. In other cases, the N- and C-termini of SalAT are fused and the enzyme is digested and blunt end cloned. In other cases, this library of circularly permuted SalAT is screened for salutaridinol 7-O-acetyltransferase activity. In other cases, active variants from the circularly permuted SalAT library are then used to design protein fusions with a peptide with a Bet v 1 fold.

[0172] The one or more enzymes that may be used to convert a tetracyclic promorphinan precursor to a thebaine may contact the tetracyclic promorphinan precursor in vitro. Additionally, or alternatively, the one or more enzymes that may be used to convert a tetracyclic promorphinan precursor to thebaine may contact the tetracyclic promorphinan precursor in vivo. Additionally, the one or more enzymes that may be used to convert a tetracyclic promorphinan precursor to thebaine may be provided to a cell having the tetracyclic promorphinan precursor within, or may be produced within an engineered host cell.

[0173] In some examples, the methods provide for engineered host cells that produce an alkaloid product, wherein the conversion of a tetracyclic promorphinan precursor to a thebaine may comprise a key step in the production of an alkaloid product. In some examples, the alkaloid product is a thebaine. In still other embodiments, the alkaloid product is derived from a thebaine, including for example, downstream morphinan alkaloids. In another embodiment, a tetracyclic promorphinan precursor is an intermediate toward the product in of the engineered host cell. In still other embodiments, the alkaloid product is selected from the group consisting of morphinan, nor-opioid, or nal-opioid alkaloids.

[0174] In some examples, the substrate of the reduction reaction is a compound of Formula III:

[chemical structure]

[0175] or a salt thereof, wherein:

[0176] R₁, R₂, and R₃ are independently selected from hydrogen and methyl.

[0177] In some other examples, R₁, R₂, and R₃ are methyl, and the reduction reaction is catalyzed by a salutaridine reductase.

[0178] In some examples, the substrate of the carbon chain transfer reaction is a compound of Formula IV:

[chemical structure]

[0179] or a salt thereof, wherein:

[0180] R₁, R₂, and R₃ are independently selected from hydrogen and methyl.

[0181] In some other examples, R₁, R₂, and R₃ are methyl, and the carbon chain transfer reaction is catalyzed by a salutaridinol 7-O-acetyltransferase.

[0182] In some examples, the substrate of thebaine synthase is a compound of Formula V:

[chemical structure]

[0183] or a salt thereof, wherein:

[0184] R₁, R₂, and R₃ are independently selected from hydrogen and methyl; and

[0185] R₄ is selected from methyl, ethyl, propyl, and other appropriate alkyl group.

[0186] In some other examples, R₁, R₂, R₃, and R₄ are methyl, and the ring closure reaction is catalyzed by a thebaine synthase. In some examples, the thebaine synthase is a Bet v 1 protein.

[0187] In some examples, the methods provide for engineered host cells that produce alkaloid products from salutaridine. The conversion of salutardine to thebaine may comprise a key step in the production of diverse alkaloid products from a precursor. In some examples, the precursor is L-tyrosine or a sugar (e.g., glucose). The diverse alkaloid products can include, without limitation, morphinan, nor-opioid, or nal-opioid alkaloids.

[0188] Any suitable carbon source may be used as a precursor toward a pentacyclic morphinan alkaloid. Suitable precursors can include, without limitation, monosaccharides (e.g., glucose, fructose, galactose, xylose), oligosaccharides (e.g., lactose, sucrose, raffinose), polysaccharides (e.g., starch, cellulose), or a combination thereof. In some examples, unpurified mixtures from renewable feedstocks can be used (e.g., cornsteep liquor, sugar beet molasses, barley malt, biomass hydrolysate). In still other embodiments, the carbon precursor can be a one-carbon compound (e.g., methanol, carbon dioxide) or a two-carbon compound (e.g., ethanol). In yet other embodiments, other carbon-containing compounds can be utilized, for example, methylamine, glucosamine, and amino acids (e.g., L-tyrosine). In some examples, a 1-benzylisoquinoline alkaloid may be added directly to an engineered host cell of the invention, including, for example, norlaudanosoline, laudanosoline, norreticuline, and reticuline.

[0189] In some examples, the benzylisoquinoline alkaloid product, or a derivative thereof, is recovered. In some examples, the benzylisoquinoline alkaloid product is recovered from a cell culture. In some examples, the benzylisoquinoline alkaloid product is a morphinan, nor-opioid, or nal-opioid alkaloid.

TABLE 2
Example amino acid sequences of morphinan alkaloid generating enzymes.

| Sequence | | | |
|---|---|---|---|
| Name | Description | Sequence | SEQ. ID. NO. |
| Bet v1 | | | |
| | P. bracteatum | MAPRGVSGLVGKLSTELDVNCDAEKYYNMYKNGEDVQKA | SEQ. ID. NO. 30 |
| | | VPHLCMDVKVISGDATRSGCIKEWNVNIDGKTIRSVEET | |
| | | THNDETKTLRHRVFEGDMMKDYKKFDTIMEVNPKPDGNG | |
| | | CVVTRSIEYEKVNENSPTPFDYLQFGHQAMEDMNKY | |
| | P. setigerum | MLVGKLSTELEVDCDAEKYYNMYKHGEDVKKALCVDVKV | SEQ. ID. NO. 31 |
| | | ISGDPTRSGCIKEWNVNIDGKTIRSVEETTHNDETKTLR | |
| | | HRVFEGDMMKDFKKFDTIMVVNPKPDGNGCVVTRSIEYE | |
| | | KTNENSPTPFDYLQFGHQAIEDMNKYL | |
| | P. setigerum | MLVGKLSTELEVDCDAEKYYNMYKHGEDKRQCVDVKVIS | SEQ. ID. NO. 32 |
| | | GDPTRSGCIKEWNVNIDGKTIRSVEETTHNDETKTLRHR | |
| | | VFEGDMMKDFKKFDTIMVVNPKPDGNGCVVTRSIEYEKT | |
| | | NENSPTPFDYLQFGHQAIEDMNKY | |
| | P. setigerum | MLVGKLSTELEVDCDAEKYYNMYKHGEDVKKAVPHLCVD | SEQ. ID. NO. 33 |
| | | VKIISGDPTSSGCIKEWNVNIDGKTIRSVEETTHDDETK | |
| | | TLRHRVFEGDVMKDFKKFDTIMVVNPKPDGNGCVVTRSI | |
| | | EYEKTNENSPTPFDYLQFGHQAIEDMNKYL | |
| | P. setigerum | MVKIISGDPTSSGCIKEWNVNIDGKTIRSVEETTHDDET | SEQ. ID. NO. 34 |
| | | KTLRHRVFEGDVMKDFKKFDTIMVVNPKPDGNGCVVTRS | |
| | | IEYEKTNENSPTPFDYLQFGHQAIEDMNKYL | |
| | P. somniferum | MDSINSSIYFCAYFRELIIKLLMAPPGVSGLVGKLSTEL | SEQ. ID. NO. 35 |
| | | EVNCDAEKYYNMYKHGEDVQKAVPHLCVDVKVISGDPTR | |
| | | SGCIKEWNVNIDGKTIRSVEETTHNDETKTLRHRVFEGD | |
| | | VMKDFKKFDTIMVVNPKPDGNGCVVTRSIEYEKTNDNSP | |
| | | TPFDYLQFGHQAIEDMNKYLRDSE | |
| | P. somniferum | MNFFIKDHLYICLVGKLSTELEVDCDAEKYYNMYKHGED | SEQ. ID. NO. 36 |
| | | VKKAVPHLCVDVKIISGDPTSSGCIKEWNVNIDGKTIRS | |
| | | VEETTHDDETKTLRHRVFEGDVMKDFKKFDTIMVVNPKP | |
| | | DGNGCVVTRSIEYEKTNENSPTPFDYLQFGHQAIEDMNK | |
| | | YLRDSESN | |
| | P. somniferum | MAPLGVSGLVGKLSTELEVDCDAEKYYNMYKHGEDVKKA | SEQ. ID. NO. 37 |
| | | VPHLCVDVKIISGDPTSSGCIKEWNVNIDGKTIRSVEET | |
| | | THDDETKTLRHRVFEGDVMKDFKKFDTIMVVNPKPDGNG | |
| | | CVVTRSIEYEKTNENSPTPFDYLQFGHQAIEDMNKYLRD | |
| | | SESN | |
| SalAT | | | |
| | P. somniferum | MMKVCVSSREKIKPSRPTPGHLKTHKLSFLDQVAARIYV | SEQ. ID. NO. 38 |
| | | PLLLYYAGNKENVDTDTRCNIIKKSLAETLTKFYILAGK | |
| | | IVNDEIERFVNCNDDGVDFCVTKVSNCQLFQVIKRPDIF | |
| | | DQVTLFLPFDPCDNEITASGDFLLSVQVNVFEDCRGMVI | |
| | | GLCINHKVADASSITTFVNYWATIARGLVLNVDDRQIQD | |
| | | PCFQVQSIFPQKEKGIGFKISSSSIDGTLVTKKFGFEAS | |
| | | KLAELKERCKFAGATEDIRGGYKPNRVEALSTFLWKCFI | |
| | | DIDQAKTKAAAPARVYLASNAVNIRSRIVPQLPTSSFGN | |
| | | MVAITDAIFTVNSNENNGINDPYYPKLVQKFRDAVKRVD | |
| | | GEYIEALQSTDLLLNNVTKLFKHILNGQTLSISFTSWCR | |
| | | FPFYDTDLLD | |
| | P. somniferum | MKVQVISKELIKPSTPTPPRLRNFKLSLLDQLLPPFYVP | SEQ. ID. NO. 39 |
| | | IIIFYPANDDHESNNNDQCIKANILKKSLSETLTRFYPI | |
| | | AGRIRDKILVECNDEGVHYIEAKVNAVMSDFMSLDVIHQ | |
| | | LHPSYITLDDLAEEAQLAVQVTMFDCGGIALSICSSHKI | |
| | | IDGCTSTTFLNSWAATARAPSNPEIVYPTFDAAAIFPAQ | |
| | | PSGVQVSTLESDDRLQGENVVTKRFLFSASKITALRARI | |
| | | AESRSSNILSKYPSRSEAVSALVWKSFMETSRVKVTREH | |
| | | TFSAEASTKPIVRSIANFVVNLRTRLNPPLPNVSFGNII | |
| | | MDATAESLIIDNGENTLGFVETLDGLISQLRLGVTKMDD | |
| | | EYVRKLREDDVEFLKSLDEASHPSNGEGDGNGERV | |
| | P. setigerum | MNDTMKIEVVSKESIKPSYPTPNNLKIHNLSNLDQLIPA | SEQ. ID. NO. 40 |
| | | FYMDHILYYPSLDSNDSSLGDDEEDKKMIFSASSRHRCD | |
| | | VVKKSLAETLTRYYPLAGRIKDEKSVECNDEGVDYIEAR | |
| | | VVGITVSQVIQLASSDIEVMEPFLPYEPYGGTGSAFRRA | |
| | | GIHSNSKPLLKIQVNVFDCGGMVICLSGSHKVIDATSIL | |
| | | NFVNDWAATARGGFDTHDDELKVAVVDKPCYIFSSMFPP | |
| | | TSFGNQEEKDTADQAQLVPDRIEIVTKRFVFKDSSIAKL | |
| | | KKKCIHVNTNNGSDHQVDKQEHNMQQMPSRIEALTSLIW | |
| | | MCFMDVDRRFRVKQIDDAVSPVNTVNEVSLPKQVQYVAG | |
| | | FAINLRTRTIQPLPTNSFGNMTDTAIAEVTLNLTGSDHF | |
| | | NNEKGIRDQSQNYPELVSKIKDSIKLVDNKHIEAMKRNL | |
| | | AISCNNIKMHQMMKESTFDQNTRELLMFSSWCRFPIYEA | |
| | | DFGWGKPSWASITKLLYKNCVMFLDTSSGDGIEAWVSLK | |
| | | EEDMVEFERHEELVALAS | |
| | P. somniferum | MKVQVISKEIIKPSSPTPPHLRNFKLSLLDQILPPFYVP | SEQ. ID. NO. 41 |
| | | IVMFYPAGDDYVTNNNIHDQSSKSEFLKKSLSETLTRFY | |
| | | PIAGRIKDNILIDCNNEGVDYIEAKVNGIMSDFMSVDVV | |
| | | HQLHPSHIMLDDVAKEAQLAVQVNLFDCGGIAISISMSH | |
| | | KIVDACTAITFINGWAATARAAPKQEIVCPTFDSAAIFP | |
| | | ALPPGVQVSSLESDDSVQGVNVVTKMFAFTAPKIASLRA | |
| | | RIAELRSSSDGLSKYPTRTEALSALVWKSFIRTSRVKAA | |
| | | RKYSLSPASTKPVIKSVANYAVNLRTRLNPPLPQVSFGN | |
| | | ILMDATAESTTTIDDDDSHEFADTLAGLIGQLRLGVSRI | |
| | | NGDYIRKLQEGDLAFLKSLDEASHDSNGEKVQICWISSL | |
| | | CRFPFYEADFGWGKPSWVALNTNAEYKNSLFLMDTKCGT | |
| | | GIEAWVSLEEDDMAIFEEDQDLLQCVKSIN | |
| | P. setigerum | MENMKVEVVLKQTIKPSTQTPLHSKTFNLSFLDQHLGPP | SEQ. ID. NO. 42 |
| | | IYIPFTLYYESGDVNNKNNHCDGYKNNLEEACEHRVSVI | |
| | | KQSLSETLARYYPLAGRMKEDNLAVECNDEGVEYFETRV | |
| | | SDVRLSQVIKRSPNHNSVLRKFLPPCISSCDNSMSIPFD | |
| | | YGFKSKTLLAIQVNIFECGGIVIGMCMAHRLADASTMFT | |
| | | FITDWAATARGAIEDIKGPSFDFSYTLFPQKDVINNFKP | |
| | | FDPMLTREEDLVTKYFVFPASKIVELKRRNVNNIVCQDT | |
| | | SQQNTSPCTRVEAVTSFMWKRYMDSVRAKNQTQATSVEK | |
| | | YGALYTVNLRSRITPPLPANSFGNIYTFTIALSTPSDEN | |
| | | DIDDGLRKDVSSPNDLNLVGKVRDAIKKIDDKYTRKLQS | |
| | | SEDELVNDVKPLTSGEAIFLGFSSWCRFPIYEADFGWGK | |
| | | PTWVSIGTMALRNTVFLMDTKSGDGIEAFVNMAKEDMDN | |
| | | FEVKLLADQ | |
| | P. setigerum | MENMKVEVVLEQTIKPSTQTPLHSKTFNLSFLDQHLGPP | SEQ. ID. NO. 43 |
| | | IYIPFTLYYESGDVNNKNNHCDGYKNNLEEVCEHRVSVI | |
| | | KQSLSETLARYYPLAGRMKEDNLAVECNDEGVEYFETRV | |
| | | SDVRLSQVIKRSPNHNSVLRKFLPPCISSCDNSMSIPFD | |
| | | YGFKSKTLLAIQVNIFECGGIVIGMCMAHRLADASTMFT | |
| | | FITDWAATARGAIEDIKGPSFDFSYTLFPQKDVINNFKP | |
| | | FDPMLTREEDLVTKYFVFPASKIVELKRRNVNNIVCQDT | |
| | | SQQNTSPCTRVEAVTSFMWKRYMDSVRAKNQTQATSVEK | |
| | | YGALYTVNLRSRITPPLPANSFGNIYTFTIALSTPSDEN | |
| | | DIDDGLRKDVSSPNDLNLVGKVRDAIKKIDDKYTRKLQS | |
| | | SEDELVNDVKPLTSGEAIFLGFSSWCRFPIYEADFGWGK | |
| | | PTWVSIGTMALRNTVFLMDTKSGDGIEAFVNMAKEDMDN | |
| | | FEVKLLADQLLHVHPTV | |
| | P. setigerum | MSSTVEVISKQTIKPSTPTPIQRKNHSLSLIDQHFAPIY | SEQ. ID. NO. 44 |
| | | IPIVLFYPAAAVNDTGNVQHGDNTCVLKRSLSETLVHFY | |
| | | PLAGRMKDNIVVDCNDQGVEFTEVKVSGTMCDFLMKPDE | |
| | | QLSGLLPSEAVCMNFVREAQVMIQVNTFDCGSKAISLCV | |
| | | SHKIADASTITTFSRCWAETTIAVSKSTSAVTPIVSSKF | |
| | | HPTFDAASLFPPIKQLISPSGVTPALPELIPSEESKFGK | |
| | | IISKRFLFSATTINSVREKLSALMADKLKYRRLTRVEVV | |
| | | SALIWNSFDKLATTGSVAVMVKHAVNLRKRIDPPLPDVS | |
| | | FGNILEFTKAVVGEAAANTTTQGTVGSSSKLLEELSEFA | |
| | | GQLREPVSKMNKGDHDFDMENTDYEERDLWMSSWCNYGL | |
| | | YDIDFGCGKPVWVTTVATMYPYSDGFFMNDTRCGQGIEV | |
| | | WGNLVEEDMANFQLNLSELLDRI | |
| | P. somniferum | MMKVCVSSREKIKPSRPTPGHLKTHKLSFLDQVAARIYV | SEQ. ID. NO. 45 |
| | | PLLLYYAGNKENVDTDTRCNIIKKSLAETLTKFYILAGK | |
| | | IVNDEIERFVNCNDDGVDFCVTKVSNCQLFQVIKRPDIF | |
| | | DQVTLFLPFDPCDNEITASGDFLLSVQVNVFEDCRGMVI | |
| | | GLCINHKVADASSITTFVNYWATIARGLVLNVDDRQIQD | |
| | | PCFQVQSIFPQKEKGIGFKISSSSIDGTLVTKKFGFEAS | |
| | | KLAELKERCKFTTEPEDGYKPTRVEALSAFLWKCFIDID | |
| | | QAKLKGVARTKVYLATNAVNMRSRMVPQLPTSSFGNIIS | |
| | | ITDAVFSINNDDSTGINDPYYPKLVRKFRDAIKKIDRDY | |
| | | IEALRSTDLLLNNMMKLIEHVLSGHTLSIYFSSWCRFPL | |
| | | YETDFGWGKPIWVSTCTIPQKNVIVLMDSNSSADGIEAY | |
| | | VTLAKEDMGELEHHEELLALIS | |
| Dirigent | | | |
| proteins | | | |
| | P. somniferum | MGAMKFFSFLAVAMVLSLAHIQAQQGNWGDETVPYTMGP | SEQ. ID. NO. 46 |
| | | EKITKLRFYFHDIVTGNNPTAVQIAQATGTNSSSTLFGA | |
| | | LFMIDDPLTEGPDPDSRLVGRAQGFYGSAGQNEAALILG | |
| | | MSLVFTGNEKFNGSTISVLSRNPVTHTEREFAIVGGTGY | |
| | | FQFARGFISAKTYSLVGPNAVVEYNCTIVHPSSVSESGK | |
| | | SNSSPGKSDSNSGSQISLGSNLVFVSVIAYVTIILSL | |
| | P. setigerum | MVLSMSHSQAQEGNWGDESVPYTMGPEKMTKLRFYFHDI | SEQ. ID. NO. 47 |
| | | ITGNSPTAVQIAQATGTNTSATMFGALMMIDDPLTEGPD | |
| | | PNSRLVGRAQGFYGSAGQNELALILGMSLVFTGNEKFNG | |
| | | STISVLSRNPVMHTEREFAIVGGTGYFQFARGFISAKTY | |
| | | SLVGPNAVVEYNCTIVHPSSVSESGKSDSSSGKSDSSSG | |
| | | SQISLGTNLVFLSVIAFVTIIVSPQHFSW | |
| Chalcone | | | |
| isomerase | | | |
| | P. somniferum | MTKTVLVDDIPFPQNITTVTTEKQLPLLGQGITDMEIHF | SEQ. ID. NO. 48 |
| | | LQIKFTAIGTAIGVYLEPEIASHLQQWKGKTGAELSQDD | |
| | | EFFAAVVSASVEKYVRVVVIKEIKGSQYMLQLESWVRDE | |
| | | LAAADKYEDEEEESLDKVIEFFQSKYLKQLSFIPSHFSA | |
| | | TTPAVAEIGLEIEGQKDLKIKVENGNVIEMIQKWYLGGT | |
| | | RGVSPSTTQSLATSL | |
| | P. somniferum | MPFLKAIEIEGCKFRPFVTPPGSTQILFLAGSGVKEEFG | SEQ. ID. NO. 49 |
| | | DSKSMKYSSCAIYLQPTCILYLAKAWAQKSVVDITQSLN | |
| | | FFMDIATGPFEKYCRITMLETAKGEDYAAMITKNCEEML | |
| | | TNSKRYSETAKAALTKFSEAFNGRTLASGSSIHVTVSTS | |
| | | NSVTLAFTEDGSTPKQGDVTLDCKEVGEAFLMSTISLHT | |
| | | TIRESMGSRISGLYK | |
| | P. setigerum | MAPMAQLSEIQVEQFVFPPTMTPPSSTESLFLGGAGVRG | SEQ. ID. NO. 50 |
| | | LQIQDRFIKFTAIGVYLAEEAIPSLSPKWKSKSPEELTD | |
| | | DVEFFMDIVTGPFEKFVKITMILPLTGDQYAEKVTENCI | |
| | | QYLKSKDMYTDAEAKAVERFIEIFKNEMFPPASSILFTI | |
| | | SPAGSLTVGF* | |
| | P. rhoeas | MVYLEPEIATHLKQWKGKTGAELSQDDDFFSAVVSAPVE | SEQ. ID. NO. 51 |
| | | KYVRVVVIKEIKGSQYMLQLESWVRDELAAADKYEDEEE | |
| | | ESLDKVIEFFQSKYLKQHSVIITFHFSATTPAVAEIGLE | |
| | | IEGQKDLKIKVENGNVVEMIQKWYLGGTRGVSPSTTQSL | |
| | | ATSL | |
| | P. bracteatum | MTKMVLVDDIPFPQNITTATTAKQLPLLGQGITDMEIHF | SEQ. ID. NO. 52 |
| | | LQIKFTAIGVYLEPEIASHLKQWKGKTGAELSQDDEFFS | |
| | | AIVSAPVEKYVRVVVIKEIKGSQYMLQLESWVRDELAAA | |
| | | DKYEDEEEESLEKVIEFFQSKYLKQHSVIPFHFSATTPA | |
| | | VAEIGLEIEGHKDLKMKVENGNVVEMIQKWYLAGTRGVS | |
| | | PSTTQSLATSL | |
| | P. bracteatum | MAPMAQLSEIQVEQFVFPPTMTPPSSTESLFLGGAGVRG | SEQ. ID. NO. 53 |
| | | LQIQDRFIKFTAIGVYLAEEAIPSLSPKWKSKTPEELTN | |
| | | DVEFFMDIVTGPFEKFVKITMILPLTGDQYAEKVTENCV | |
| | | EYLKSKDLYTDAEAKAVERFIEIFKNEMFPPASSILFTI | |
| | | SPTGSLTVGFSKDTSIPEARNAVIENKALSESILESIIG | |
| | | KNGVSPAAKQSLAERISELLK | |
| Other | | | |
| | P. ginseng | MGLTGKLICQTGIKSDGDVFHELFGTRPHHVPNITPANI | SEQ. ID. NO. 54 |
| | | QGCDLHEGEFGKVGSVVIWNYSIDGNAMIAKEEIVAIDE | |
| | | EDKSVTFKVVEGHLFEEFKSIVFSVHVDTKGEDNLVTWS | |
| | | IDYEKLNESVKDPTSYLDFLLSVTRDIEAHHLPK | |
| | A. hypogaea | | |
| | | MGVFTFEDEITSTVPPAKLYNAMKDADSITPKIIDDVKS | SEQ. ID. NO. 55 |
| | | VEIVEGNGGPGTIKKLTIVEDGETKFILHKVESIDEANY | |
| | | AYNYSVVGGVALPPTAEKITFETKLVEGPNGGSIGKLTL | |
| | | KYHTKGDAKPDEEELKKGKAKGEGLFRAIEGYVLANPTQ | |
| | | Y | |
| | H. perforatum | MGIDPFTMAAYTIVKEEESPIAPHRLFKALVLERHQVLV | SEQ. ID. NO. 56 |
| | | KAQPHVFKSGEIIEGDGGVGTVTKITFVDGHPLTYMLHK | |
| | | FDEIDAANFYCKYTLFEGDVLRDNIEKVVYEVKLEAVGG | |
| | | GSKGKITVTYHPKPGCTVNEEEVKIGEKKAYEFYKQVEE | |
| | | YLAANPEVFA | |
| | L. luteus | MGVFTFQDEYTSTIAPAKLYKALVTDADIIIPKAVETIQ | SEQ. ID. NO. 57 |
| | | SVEIVEGNGGPGTIKKLTFIEGGESKYVLHKIEAIDEAN | |
| | | LGYNYSIVGGVGLPDTIEKISFETKLVEGANGGSIGKVT | |
| | | IKIETKGDAQPNEEEGKAAKARGDAFFKAIESYLSAHPD | |
| | | YN | |
| | Strawberry | MAGVFTYETEFTSVIPPPRLFKAFILDADNLIPKIAPQA | SEQ. ID. NO. 58 |
| | (Fragaria x | VKCAEHEGDGGVGTIKKITFGEGSQFGSVTHKIDGIDKE | |
| | ananassa) | NFVYSYSLIEGDALSDKIEKISYETKLVSSSDGGSIIKS | |
| | | TSNYHTKGDVEIKEEHVKAGKEKFSHLFKLVEGYLLANP | |
| | | NEYC | |
| | A. deliciosa | MDLSGKMVKQVEILSDGIVFYEIFRYRLYLISEMSPVNI | SEQ. ID. NO. 59 |
| | | QGVDLLEGNWGTVGSVIFFKYTIDGKEKTAKDIVEAIDE | |
| | | ETKSVTFKIVEGDLMELYKTFIIIVQVDTKGEHNSVTWT | |
| | | FHYEKLKEDVEEPNTLMNFCIEITKDIETYHLK | |
| | T. flavum | MGHNQVSTVTKVIHHELEVAASADDIWTVYSWPGLAKHL | SEQ. ID. NO. 60 |
| | | PDLLPGAFEKLEIIGDGGVGTILDMTFVPGEFPHEYKEK | |
| | | FILVDNEHRLKKVQMIEGGYLDLGVTYYMDTIHVVPTGK | |
| | | DSCVIKSSTEYHVKPEFVKIVEPLITTGPLAAMADAISK | |
| | | LVLEHKS | |
| | V. radiata | MVKEFNTQTELSVRLEALWAVLSKDFITVVPKVLPHIVK | SEQ. ID. NO. 61 |
| | | DVQLIEGDGGVGTILIFNFLPEVSPSYQREEITEFDESS | |
| | | HEIGLQVIEGGYLSQGLSYYKTTFKLSEIEEDKTLVNVK | |
| | | ISYDHDSDIEEKVTPTKTSQSTLMYLRRLERYLSNGSA | |

### Morphinan Alkaloid Isomerization Modifications

[0190] Some methods, processes, and systems provided herein describe the production of morphinan alkaloid isomers. Some of the methods, processes, and systems describe the conversion of a precursor morphinan alkaloid with a carbon-carbon double bond between carbons C-14 and C-8 into a product morphinan alkaloid with a carbon-carbon double bond between carbons C-8 and C-7 (FIG. 4). Some of the methods, processes, and systems may comprise an engineered host cell. In some examples, the conversion of a precursor morphinan alkaloid with a carbon-carbon double bond between carbons C-14 and C-8 into a product morphinan alkaloid with a carbon-carbon double bond between carbons C-8 and C-7 are significant steps in the conversion of a precursor to a diverse range of benzylisoquinoline alkaloids.

[0191] In some examples, the production of precursor morphinan alkaloids with a carbon-carbon double bond between carbons C-14 and C-8 occurs within the engineered host cell comprising a plurality of heterologous enzymes for converting simple starting materials to the precursor morphinan alkaloids. In some examples, the simple starting materials are sugar and/or L-tyrosine.

[0192] In some examples, the isomer precursor morphinan alkaloid may be neopinone, neopine, neomorphine, or neomorphinone. The precursor morphinan alkaloid may be converted to the desired isomer by rearrangement of a carbon-carbon double bond between carbons C-14 and C-8 and carbons C-8 and C-7. In some cases, examples of the products formed by isomerization may be codeinone, codeine, morphine, or morphinone. In some examples, the rearrangement that generates the desired isomer occurs spontaneously. In other examples, the rearrangement that generates the desired isomer is promoted by factors such as pH and solvent. In other examples, the carbon-carbon double bond is transposed by contact with a protein or enzyme. The isomerization conversion step is provided in FIG. 4 and represented generally in Scheme 3. R₁, R₂, R₃, and R₄ may be O, OH, H, CH₃, or other appropriate alkyl groups.

[chemical structure]

[0193] In some examples, the first enzyme that generates an isomer precursor morphinan alkaloid is thebaine 6-O-demethylase (T6ODM). In some cases, T6ODM O-demethylates the substrate thebaine at the C-6 position. In some examples, the product of this reaction is neopinone. In some examples, the T6ODM may catalyze the O-demethylation reaction within a host cell, such as an engineered host cell, as described herein.

[0194] In some examples, the isomer precursor morphinan alkaloid is neopinone. In some examples, neopinone undergoes isomerization to codeinone. In some examples, partitioning from neopinone to codeinone may reach equilibrium in aqueous solution such that neopinone and codeinone exist at steady state concentrations. In some examples, the rate of conversion of neopinone to codeinone is promoted by pH. In some examples, the rearrangement of neopinone to codeinone is catalyzed by an enzyme with neopinone isomerase activity. In some examples, this enzyme is a Bet v 1-fold protein. In some examples, this enzyme is a neopinone isomerase (NPI). In some examples, this enzyme is an engineered protein with a truncation of its N-terminal sequence. In some examples, the NPI may catalyze the isomerization reaction within a host cell, such as an engineered host cell, as described herein.

[0195] In some examples, the enzyme that acts on codeinone is codeinone reductase (COR). In some cases, COR reduces the ketone at position C-6 of codeinone to form a hydroxyl. In some examples, the product of this reaction is codeine. In some examples, COR is selected from numerous gene duplication and alternative splicing isoforms to exhibit the highest activity when paired with the protein encoding the neopinone isomerase activity. In some examples, the COR may catalyze the reduction reaction within a host cell, such as an engineered host cell, as described herein.

[0196] In some examples, the enzyme that acts on codeinone is morphinone reductase (morB). In some cases, morB saturates the carbon-carbon double bond between C-7 and C-8 of codeinone. In some examples, the product of this reaction is hydrocodone. In some examples, the morB may catalyze the reduction reaction within a host cell, such as an engineered host cell, as described herein.

[0197] In some examples, the thebaine 6-O-demethylase enzyme may be T6ODM or a T6ODM-like enzyme from plants in the Ranunculales order that biosynthesize morphine, for example Papaver somniferum. In some examples, T6ODM may be a T6ODM-like enzyme from plants that biosynthesize benzylisoquinoline alkaloids, for example P. bracteatum, P. rhoeas, P. nudicaule, and P. orientate. In some examples, the plant enzyme is a 2-oxoglutarate/Fe(II)-dependent dioxygenase that uses 2-oxoglutarate and oxygen and generates succinate and carbon dioxide when demethylating thebaine to produce neopinone. In some examples, T6ODM can also demethylate oripavine to generate neomorphinone.

[0198] In other examples, the enzyme with thebaine 6-O-demethylase activity may be from mammals or another vertebrate or invertebrate that biosynthesizes endogenous morphinan alkaloids.

[0199] In some examples, the neopinone isomerase (NPI) enzyme may be a Bet v 1-fold protein from plants in the Ranunculales order that biosynthesize morphine, for example Papaver somniferum. In some examples, NPI may be a NPI-like enzyme from plants that biosynthesize benzylisoquinoline alkaloids, for example P. bracteatum, P. rhoeas, P. nudicaule, and P. orientate. In some examples, the Bet v 1 protein includes the following domains in order from the N-terminus to the C-terminus: a β-strand, one or two α-helices, six β-strands, and one or two α-helices. In some examples, a truncation is performed at the N-terminus of the enzyme to remove all or part of the first domain. In some examples, the enzyme may have one or more activity-increasing components as discussed herein and as described in Examples 6 and 7. In some examples, the protein is organized such that it has a Bet v 1 fold and an active site that accepts large, bulky, hydrophobic molecules, such as the morphinan alkaloids. In some examples, the protein may be any plant Bet v 1 protein, pathogenesis-related 10 protein (PR-10), a major latex protein (MLP), fruit or pollen allergen, plant hormone binding protein (e.g., binding to cytokinin or brassinosteroids), plant polyketide cyclase-like protein, or norcoclaurine synthase (NCS)-related protein that has a Bet v 1 fold. In some examples, the function of the Bet v 1-fold protein is to catalyze a reaction that can also occur spontaneously.

[0200] In other examples, the enzyme with neopinone isomerase activity may be from mammals or another vertebrate or invertebrate that biosynthesizes endogenous morphinan alkaloids.

[0201] In some examples, the codeinone reductase enzyme may be COR or a COR-like enzyme from plants in the Ranunculales order that biosynthesize morphine, for example P. somniferum. In some examples, COR may be a COR-like enzyme from plants that biosynthesize benzylisoquinoline alkaloids, for example P. bracteatum, P. rhoeas, P. nudicaule, and P. orientate. In some examples, the plant enzyme is an oxidoreductase that uses NADPH as a cofactor in the reversible reduction of codeinone to codeine. In some examples, the COR enzyme is a particular gene duplication or splicing variant selected to have select kinetic parameters, for example a higher rate of activity for one or more reactions (K_{cat}), improved binding affinity to one or more substrates (K_{M}), enhanced specificity for substrate codeinone over neopinone, or enhanced thermostability. In some examples, the COR enzyme may act to reduce other morphinan alkaloid substrates, for example neopinone, morphinone, neomorphinone, hydrocodone, hydromorphone, oxycodone, oxymorphone, 14-hydroxycodeinone, or 14-hydroxymorphinone. In some examples, the products of COR activity are neopine, morphine, neomorphine, dihydrocodeine, dihydromorphine, oxycodol, oxymorphol, 14-hydroxcodeine, or 14-hydroxymorphine.

[0202] In some examples, the morphinone reductase enzyme may be morB or a morB-like enzyme from bacteria in the Pseudomonas genus. In some examples, morphinone reductase may be an alkene reductase enzyme from a gram-negative bacterium. In some examples, the bacterial enzyme is a a/β-barrel flavoprotein that uses NADH and FMN as cofactors to saturate the carbon-carbon double bond between C-7 and C-8 of codeinone. In some examples, the morB enzyme has select kinetic parameters, for example a higher rate of activity for one or more reactions (K_{cat}), improved substrate binding affinity for one or more substrates (K_{M}), enhanced specificity for one substrate, or enhanced thermostability. The morB enzyme may also reduce other morphinan substrates, for example morphinone, neomorphinone, codeine, morphine, neopine, neomorphine, 14-hydroxycodeinone, or 14-hydroxymorphinone. Examples of products of morB activity are hydromorphone, dihydrocodeine, dihydromorphine, oxycodone, or oxymorphone.

[0203] In other examples, combinations of the above enzymes together with additional accessory proteins may function in the production of select morphinan alkaloid isomers. In some examples, these enzymes catalyze the reactions within a host cell, such as an engineered host cell, described herein.

[0204] Examples of amino acid sequences for neopinone isomerase activity are set forth in Table 3. An amino acid sequence for a neopinone isomerase that is utilized in converting a precursor morphinan alkaloid with a carbon-carbon double bond between carbons C-14 and C-8 into a product morphinan alkaloid with a carbon-carbon double bond between carbons C-8 and C-7 may be 50% or more identical to a given amino acid sequence as listed in Table 3. For example, an amino acid sequence for such a neopinone isomerase may comprise an amino acid sequence that is at least 50% or more, 55% or more, 60% or more, 65% or more, 70% or more, 75% or more, 80% or more, 81% or more, 82% or more, 83% or more, 84% or more, 85% or more, 86% or more, 87% or more, 88% or more, 89% or more, 90% or more, 91% or more, 92% or more, 93% or more, 94% or more, 95% or more, 96% or more, 97% or more, 98% or more, or 99% or more identical to an amino acid sequence as provided herein. Additionally, in certain embodiments, an “identical” amino acid sequence contains at least 80%-99% identity at the amino acid level to the specific amino acid sequence. In some cases, an “identical” amino acid sequence contains at least about 85%, 86%, 87%, 88%, 89%, 90%, 91%, 92%, 93%, 94% and more in certain cases, at least 95%, 96%, 97%, 98% and 99% identity, at the amino acid level. In some cases, the amino acid sequence may be identical but the DNA sequence is altered such as to optimize codon usage for the host organism, for example.

[0205] An engineered host cell may be provided that produces a thebaine 6-O-demethylase, neopinone isomerase, and codeinone reductase that converts a precursor morphinan alkaloid isomer into a desired product morphinan alkaloid isomer by rearrangement of a carbon-carbon double bond between carbons C-14 and C-8 and carbons C-8 and C-7, wherein the neopinone isomerase comprises an amino acid sequence selected from the group consisting of SEQ ID NOs: 82, 83, 84, 85, and 86. In some cases, the neopinone isomerase may physically interact with one or more pathway enzymes. In some cases, the physical interaction may change the activity of the one or more pathway enzymes. In some cases, the neopinone isomerase may form a fusion protein with one or more other enzymes. Enzymes that are produced within the engineered host cell may be recovered and purified so as to form a biocatalyst. These one or more enzymes may also be used to catalyze the conversion of a precursor morphinan alkaloid with a carbon-carbon double bond between carbons C-14 and C-8 into a product morphinan alkaloid with a carbon-carbon double bond between carbons C-8 and C-7.

[0206] In other examples, the neopinone isomerase comprises an amino acid sequence selected from the group consisting of SEQ ID NOs: 70, 71, 72, 73, 74, 75, 76, 77, 78, 79, 80, 81, 82, 83, 84, 85, and 86.

[0207] Examples of amino acid sequences for codeinone reductase activity are set forth in Table 4. An amino acid sequence for a codeinone reductase that is utilized in reducing a ketone at the C-6 position of a morphinan alkaloid to a hydroxyl at that position may be 50% or more identical to a given amino acid sequence as listed in Table 4. For example, an amino acid sequence for such a codeinone reductase may comprise an amino acid sequence that is at least 50% or more, 55% or more, 60% or more, 65% or more, 70% or more, 75% or more, 80% or more, 81% or more, 82% or more, 83% or more, 84% or more, 85% or more, 86% or more, 87% or more, 88% or more, 89% or more, 90% or more, 91% or more, 92% or more, 93% or more, 94% or more, 95% or more, 96% or more, 97% or more, 98% or more, or 99% or more identical to an amino acid sequence as provided herein. Additionally, in certain embodiments, an “identical” amino acid sequence contains at least 80%-99% identity at the amino acid level to the specific amino acid sequence. In some cases, an “identical” amino acid sequence contains at least about 85%, 86%, 87%, 88%, 89%, 90%, 91%, 92%, 93%, 94% and more in certain cases, at least 95%, 96%, 97%, 98% and 99% identity, at the amino acid level. In some cases, the amino acid sequence may be identical but the DNA sequence is altered such as to optimize codon usage for the host organism, for example.

[0208] An engineered host cell may be provided that produces a thebaine 6-O-demethylase, neopinone isomerase, and codeinone reductase that converts a precursor morphinan alkaloid isomer into a desired product morphinan alkaloid isomer by rearrangement of a carbon-carbon double bond between carbons C-14 and C-8 and carbons C-8 and C-7 and reduction of a ketone at the C-6 position to a hydroxyl, wherein the codeinone reductase comprises an amino acid sequence selected from the group consisting of SEQ ID NOs: 87, 88, 89, 90, 91, 92, 93, 94, 95, and 96. In some cases, the codeinone reductase may interact with or form a fusion protein with other enzymes. The enzymes that are produced within the engineered host cell may be recovered and purified so as to form a biocatalyst. These one or more enzymes may also be used to catalyze the conversion of a precursor morphinan alkaloid with a carbon-carbon double bond between carbons C-14 and C-8 into a product morphinan alkaloid with a carbon-carbon double bond between carbons C-8 and C-7.

[0209] In additional cases, the one or more enzymes that are recovered from the engineered host cell may be used in a process for converting a precursor morphinan alkaloid with a carbon-carbon double bond between carbons C-14 and C-8 into a product morphinan alkaloid with a carbon-carbon double bond between carbons C-8 and C-7. The process may include contacting the precursor morphinan alkaloid isomer with the recovered enzymes in an amount sufficient to convert said precursor morphinan alkaloid isomer to the desired morphinan alkaloid isomer product. In some examples, the precursor morphinan alkaloid isomer may be contacted with a sufficient amount of the one or more enzymes such that at least 5% of said precursor morphinan alkaloid isomer is converted to the desired product morphinan alkaloid isomer. In further examples, the precursor morphinan alkaloid isomer may be contacted with a sufficient amount of the one or more enzymes such that at least 10%, at least 15%, at least 20%, at least 25%, at least 30%, at least 35%, at least 40%, at least 45%, at least 50%, at least 55%, at least 60%, at least 65%, at least 70%, at least 80%, at least 82%, at least 84%, at least 86%, at least 88%, at least 90%, at least 91%, at least 92%, at least 93%, at least 94%, at least 95%, at least 96%, at least 97%, at least 98%, at least 99%, at least 99.5%, at least 99.7%, or 100% of said precursor morphinan alkaloid isomer is converted to the desired product morphinan alkaloid isomer.

[0210] In some examples, process conditions are implemented to support the formation of the desired product morphinan alkaloid isomer in engineered host cells. In some cases, engineered host cells are grown at pH 3.3, and once high cell density is reached the pH is adjusted to pH 6-6.5 to support continued production of the desired product morphinan alkaloid isomers at higher pH. In some cases, the engineered host cells produce additional enzymes to convert sugar and other simple starting materials, such as tyrosine, to the desired product morphinan alkaloid isomers.

[0211] In some examples, one or more of the enzymes converting a precursor morphinan alkaloid with a carbon-carbon double bond between carbons C-14 and C-8 to a product morphinan alkaloid with a carbon-carbon double bond between carbons C-8 and C-7 are localized to cellular compartments. In some examples, T6ODM, COR or morB, and NPI may be modified such that they encode targeting sequences that localize them to the endoplasmic reticulum membrane of the engineered host cell. In particular, in certain instances, the host cell may be engineered to increase production of product morphinan alkaloid isomers or its precursors by localizing NPI and/or T6ODM and/or COR and/or morB to organelles in the yeast cell. NPI and/or T6ODM and/or COR and/or morB may be localized to the yeast endoplasmic reticulum in order to decrease the spatial distance between these enzymes. By increased production is meant both the production of some amount of the compound of interest where the control has no production of the compound of interest, as well as an increase of 10% or more, such as 50% or more, including 2-fold or more, e.g., 5-fold or more, such as 10-fold or more in situations where the control has some production of the compound of interest.

[0212] In other examples, T6ODM and NPI may be co-localized in to a single protein fusion. In other examples, COR or morB and NPI may be co-localized in to a single protein fusion. In some examples, the fusion is between the proteins is created by one of several methods, including, direct fusion, co-localization to a yeast organelle, or by enzyme co-localization tools such as leucine zippers, protein scaffolds that utilize adaptor domains, or RNA scaffolds that utilize aptamers. Co-localizing the neopinone isomerase enzyme may facilitate substrate channeling between the active sites of the enzymes and limit the diffusion of unstable intermediates such as neopinone and codeinone.

[0213] In some examples, an engineered T6ODM enzyme is used in converting between morphinan alkaloid isomers. In some examples, a T6ODM enzyme is engineered to combine two functions: (1) the O-demethylation of thebaine at the C-6 position, and (2) the rearrangement of a carbon-carbon double bond between carbons C-14 and C-8 and carbons C-8 and C-7.

[0214] In some examples, an enzyme with thebaine 6-O-demethylase activity is fused to a peptide with a Bet v 1 fold. In some examples, the thebaine 6-O-demethylase enzyme and the Bet v 1 fold protein may be fused in any order from N-terminus to C-terminus, C-terminus to N-terminus, N-terminus to N-terminus, or C-terminus to C-terminus. In some examples, the two protein sequences may be fused directly or fused through a peptide linker region.

[0215] In some examples, an enzyme with thebaine 6-O-demethylase activity is fused to a peptide with a Bet v 1 fold by circular permutation. In some cases, the N- and C-termini of T6ODM are fused and the Bet v 1 sequence is then inserted randomly within this sequence. In some cases, the resulting fusion protein library is screened for production of the desired morphinan alkaloid isomer product. In other cases, a circular permutation T6ODM library is first screened for activity in the absence of Bet v 1. In other cases, the N- and C-termini of T6ODM are fused and the enzyme is digested and blunt end cloned. In other cases, this library of circularly permuted T6ODM is screened for thebaine 6-O-demethylase activity. In other cases, active variants from the circularly permuted T6ODM library are then used to design protein fusions with a peptide with a Bet v 1 fold.

[0216] In some examples, an engineered COR or morB enzyme is used in converting between morphinan alkaloid isomers. In some examples, a COR or morB enzyme is engineered to combine two functions: (1) the rearrangement of a carbon-carbon double bond between carbons C-14 and C-8 and carbons C-8 and C-7, and (2) the reduction of a morphinan alkaloid isomer product.

[0217] In some examples, an enzyme with opioid reductase activity is fused to a peptide with a Bet v 1 fold. In some examples, the COR or morB enzyme and the Bet v 1 fold protein may be fused in any order from N-terminus to C-terminus, C-terminus to N-terminus, N-terminus to N-terminus, or C-terminus to C-terminus. In some examples, the two protein sequences may be fused directly or fused through a peptide linker region.

[0218] In some examples, an enzyme with opioid reductase activity is fused to a peptide with a Bet v 1 fold by circular permutation. In some cases, the N- and C-termini of COR or morB are fused and the Bet v 1 sequence is then inserted randomly within this sequence. In some cases, the resulting fusion protein library is screened for production of the desired morphinan alkaloid isomer product. In other cases, a circular permutation COR or morB library is first screened for activity in the absence of Bet v 1. In other cases, the N- and C-termini of COR or morB are fused and the enzyme is digested and blunt end cloned. In other cases, this library of circularly permuted COR or morB is screened for opioid reductase activity. In other cases, active variants from the circularly permuted COR or morB library are then used to design protein fusions with a peptide with a Bet v 1 fold.

[0219] The one or more enzymes that may be used to convert a precursor morphinan alkaloid with a carbon-carbon double bond between carbons C-14 and C-8 to a product morphinan alkaloid with a carbon-carbon double bond between carbons C-8 and C-7 may contact the precursor morphinan alkaloid isomer in vitro. Additionally, or alternatively, the one or more enzymes that may be used to convert a precursor morphinan alkaloid with a carbon-carbon double bond between carbons C-14 and C-8 to a product morphinan alkaloid with a carbon-carbon double bond between carbons C-8 and C-7 may contact the precursor morphinan alkaloid isomer in vivo. Additionally, the one or more enzymes that may be used to convert a precursor morphinan alkaloid with a carbon-carbon double bond between carbons C-14 and C-8 to a product morphinan alkaloid with a carbon-carbon double bond between carbons C-8 and C-7 may be provided to a cell having the precursor morphinan alkaloid isomer within, or may be produced within an engineered host cell.

[0220] In some examples, the methods provide for engineered host cells that produce an alkaloid product, wherein the conversion of a precursor morphinan alkaloid with a carbon-carbon double bond between carbons C-14 and C-8 to a product morphinan alkaloid with a carbon-carbon double bond between carbons C-8 and C-7 may comprise a significant step in the production of an alkaloid product. In some examples, the alkaloid product is a codeinone. In still other embodiments, the alkaloid product is derived from a codeinone, including for example, downstream morphinan alkaloids. In another embodiment, a precursor morphinan alkaloid with a carbon-carbon double bond between carbons C-14 and C-8 is an intermediate toward the product in of the engineered host cell. In still other embodiments, the alkaloid product is selected from the group consisting of morphinan, nor-opioid, or nal-opioid alkaloids.

[0221] In some examples, the substrate of the O-demethylation reaction is a compound of Formula VI:

[chemical structure]

[0222] or a salt thereof, wherein:

[0223] R₁, and R₂ are independently selected from hydrogen and methyl.

[0224] In some other examples, R₁ and R₂ are methyl, and the O-demethylation reaction is catalyzed by a thebaine 6-O-demethylase. Other examples of 6-O-demethylation reactions are provided in FIG. 11.

[0225] In some examples, the substrate of the isomerization reaction is a compound of Formula VII:

[chemical structure]

[0226] or a salt thereof, wherein:

[0227] R₁, and R₃ are independently selected from hydrogen and methyl, and R₂ is independently selected from hydroxyl and oxygen.

[0228] In some other examples, R₁, and R₃ are methyl and R₂ is oxygen, and the isomerization reaction is catalyzed by a neopinone isomerase. Other examples of isomerization reactions are provided in FIG. 17.

[0229] In some examples, the substrate of the reduction reaction is a compound of Formula VIII:

[chemical structure]

[0230] or a salt thereof, wherein:

[0231] R₁, and R₃ are independently selected from hydrogen and methyl; and R₂ is independently selected from hydroxyl and oxygen.

[0232] In some other examples, R₁ and R₃ are methyl and R₂ is oxygen, and the reduction reaction is catalyzed by a codeinone reductase. In some other examples, the reduction reaction is catalyzed by a morphinone reductase. Other examples of reduction reactions are provided in FIGS. 15 and 16.

[0233] In some examples, the methods provide for engineered host cells that produce morphinan alkaloid products from neopinone. The conversion of neopinone to codeinone may comprise a significant step in the production of diverse morphinan alkaloid products from a simple starting material. In some examples, the simple starting material is L-tyrosine or a sugar (e.g., glucose). The diverse alkaloid products can include, without limitation, morphinan, nor-opioid, or nal-opioid alkaloids.

[0234] In some examples, the engineered host cells are grown through a fed-batch fermentation process in which the simple starting material is fed over time and converted to the precursor morphinan alkaloid continuously over time in the engineered host cell, thereby providing a constant source of the precursor morphinan alkaloid. In some examples, the continuous source of precursor morphinan alkaloid is isomerized to the product morphinan alkaloid isomer continuously over time and then converted to the downstream alkaloid product through one or more enzymes that act on the morphinan alkaloid isomer in the engineered host cell, thereby providing a constant pull of the product isomer to the downstream alkaloid product. In some examples, the dynamic system process (e.g., continuous supply of the precursor morphinan alkaloid and continuous conversion of the product morphinan alkaloid isomer to a downstream alkaloid product) is a beneficial component to achieving increased production of desired alkaloid products through an enhanced reversible isomerization reaction.

[0235] In some cases, the pairing of a neopinone isomerase with a COR variant exhibiting particular kinetic properties is a beneficial component to achieving increased production of desired alkaloid products in an engineered host cell. In some cases, the pairing of a neopinone isomerase with a morB variant exhibiting particular kinetic properties is a beneficial component to achieving increased production of desired alkaloid products in an engineered host cell.

[0236] Any suitable carbon source may be used as a starting material toward a morphinan alkaloid. Suitable precursors can include, without limitation, simple starting materials such as monosaccharides (e.g., glucose, fructose, galactose, xylose), oligosaccharides (e.g., lactose, sucrose, raffinose), polysaccharides (e.g., starch, cellulose), or a combination thereof. In some examples, unpurified mixtures from renewable feedstocks can be used (e.g., cornsteep liquor, sugar beet molasses, barley malt, biomass hydrolysate). In still other embodiments, the carbon precursor can be a one-carbon compound (e.g., methanol, carbon dioxide) or a two-carbon compound (e.g., ethanol). In yet other embodiments, other carbon-containing compounds can be utilized, for example, methylamine, glucosamine, and amino acids (e.g., L-tyrosine).

[0237] In some examples, the benzylisoquinoline alkaloid product, or a derivative thereof, is recovered. In some examples, the benzylisoquinoline alkaloid product is recovered from a cell culture. In some examples, the benzylisoquinoline alkaloid product is a morphinan, nor-opioid, or nal-opioid alkaloid.

TABLE 3
Example amino acid sequences of morphinan alkaloid isomerizing enzymes.

| Sequence | | | SEQ. ID. |
|---|---|---|---|
| Name | Description | Sequence | NO. |
| THS | | | |
| | P. bracteatum | MAPRGVSGLVGKLSTELDVNCDAEKYYNMYKNGED | SEQ. ID. |
| | | VQKAVPHLCMDVKVISGDATRSGCIKEWNVNIDGKTI | NO. 62 |
| | | RSVEETTHNDETKTLRHRVFEGDMMKDYKKFDTIME | |
| | | VNPKPDGNGCVVTRSIEYEKVNENSPTPFDYLQFGHQ | |
| | | AMEDMNKY | |
| | P. setigerum | MLVGKLSTELEVDCDAEKYYNMYKHGEDVKKALCV | SEQ. ID. |
| | | DVKVISGDPTRSGCIKEWNVNIDGKTIRSVEETTHNDE | NO. 63 |
| | | TKTLRHRVFEGDMMKDFKKFDTIMVVNPKPDGNGCV | |
| | | VTRSIEYEKTNENSPTPFDYLQFGHQAIEDMNKYL | |
| | P. setigerum | MLVGKLSTELEVDCDAEKYYNMYKHGEDKRQCVDV | SEQ. ID. |
| | | KVISGDPTRSGCIKEWNVNIDGKTIRSVEETTHNDETK | NO. 64 |
| | | TLRHRVFEGDMMKDFKKFDTIMVVNPKPDGNGCVVT | |
| | | RSIEYEKTNENSPTPFDYLQFGHQAIEDMNKY | |
| | P. setigerum | MLVGKLSTELEVDCDAEKYYNMYKHGEDVKKAVPH | SEQ. ID. |
| | | LCVDVKIISGDPTSSGCIKEWNVNIDGKTIRSVEETTHD | NO. 65 |
| | | DETKTLRHRVFEGDVMKDFKKFDTIMVVNPKPDGNG | |
| | | CVVTRSIEYEKTNENSPTPFDYLQFGHQAIEDMNKYL | |
| | P. setigerum | MVKIISGDPTSSGCIKEWNVNIDGKTIRSVEETTHDDET | SEQ. ID. |
| | | KTLRHRVFEGDVMKDFKKFDTIMVVNPKPDGNGCVV | NO. 66 |
| | | TRSIEYEKTNENSPTPFDYLQFGHQAIEDMNKYL | |
| | P. somniferum | MDSINSSIYFCAYFRELIIKLLMAPPGVSGLVGKLSTEL | SEQ. ID. |
| | | EVNCDAEKYYNMYKHGEDVQKAVPHLCVDVKVISG | NO. 67 |
| | | DPTRSGCIKEWNVNIDGKTIRSVEETTHNDETKTLRHR | |
| | | VFEGDVMKDFKKFDTIMVVNPKPDGNGCVVTRSIEYE | |
| | | KTNDNSPTPFDYLQFGHQAIEDMNKYLRDSE | |
| | P. somniferum | MNFFIKDHLYICLVGKLSTELEVDCDAEKYYNMYKHG | SEQ. ID. |
| | | EDVKKAVPHLCVDVKIISGDPTSSGCIKEWNVNIDGKT | NO. 68 |
| | | IRSVEETTHDDETKTLRHRVFEGDVMKDFKKFDTIMV | |
| | | VNPKPDGNGCVVTRSIEYEKTNENSPTPFDYLQFGHQ | |
| | | AIEDMNKYLRDSESN | |
| | P. somniferum | MAPLGVSGLVGKLSTELEVDCDAEKYYNMYKHGEDV | SEQ. ID. |
| | | KKAVPHLCVDVKIISGDPTSSGCIKEWNVNIDGKTIRS | NO. 69 |
| | | VEETTHDDETKTLRHRVFEGDVMKDFKKFDTIMVVNP | |
| | | KPDGNGCVVTRSIEYEKTNENSPTPFDYLQFGHQAIED | |
| | | MNKYLRDSESN | |
| NPI | | | |
| | P. setigerum | MAQNGDFGIVGKLVIELEVSSPADKFYTIFKHQKDVPK | SEQ. ID. |
| | | AIPHLFTDGKVIEGDARRSGCIKEWKYVLEGKTISVTE | NO. 70 |
| | | KTTHNDETKTLHHRIFEGDLMKDYKKFDSIIEVNPKPT | |
| | | GHGSIVTWSFVYEKINKNSPTPFAYLPFCYQAIEDINNH | |
| | | LAASE | |
| | P. setigerum | MAHHGVSGLVGKLVTQLEVNCDADKLYKIYVPKAIS | SEQ. ID. |
| | | HLFTGVKVLEGHGLRSGCIKEWKYIIDGKALTAVEETT | NO. 71 |
| | | HGDETRTLKHRVIDGDLMKDYKKFEKIIEANPKPNGH | |
| | | GSIVTVSLLYEKINEDSPAPFDHLKFFHQNIEDMNSHIC | |
| | | ASE | |
| | P. setigerum | MARHSVSGLVGKLVTELEVSSDAEKYYKVYKHAEDV | SEQ. ID. |
| | | EKAIPHLCTGIRVIKGEASRSGCIKEWNFILEGKAIRSIE | NO. 73 |
| | | ETTHNDATRTVHHRIFEGNLMKDYKKFDSIIEVNGCIV | |
| | | ARSIVYEKRSEDSPTPFAYILFCHQAIEDMNKHLCDNE | |
| | P. setigerum | MDSVSAALVFHSSIYLCAMAHHGVSGLVGKIVTELEV | SEQ. ID. |
| | | NCNADEFYKILKRDEDVPRAVSDLFPPVKIAKGDGLVS | NO. 74 |
| | | GCIKEWDCVLDGKAMSGKEETTHNDETRTLRHRELK | |
| | | KFDSIIEVNPKPNGHGSIVTWSIEYEKMNEDSPAPFAYL | |
| | | ASFHQPNGHGSIVTWSIEYEKMNEDSPAPFAYLASFHQ | |
| | | NVVEVDSHLCLSE | |
| | P. bracteatum | MYSVSAALVSIAPYTFVRTDNNLRLLMACDGVSGLVG | SEQ. ID. |
| | | KLVTELKVNCDADKYYQIYKRPDDLQKAIPHLCTGIK | NO. 75 |
| | | LINGDASRSGCIKEWNFTLEGKRIHTVEETTHNDETRT | |
| | | LHHRIFEGDLMKDYKKFDSIIEVNPKPNGNGCVVKRSI | |
| | | VYEKINKDSPTPFSYLPFCHQAIEDMNKHLCDSE | |
| | P. bracteatum | MACDGVSGLVGKLVTELKVNCDADKYYQIYKRPDDL | SEQ. ID. |
| | | QKAIPHLCTGIKLINGDASRSGCIKEWNFTLEGKRIHTV | NO. 76 |
| | | EETTHNDETRTLHHRIFEGDLMKDYKKFDSIIEVNPKP | |
| | | NGNGCVVKRSIVYEKINKDSPTPFSYLPFCHQAIEDMN | |
| | | KHLCDSE | |
| | P. bracteatum | MAHHGVSGLVGKLVTQLEVNCDADEFYKIWKHHEEV | SEQ. ID. |
| | | PQAVSHLFPAVKVVKGDGLVSGCIKEWDYILEGKAMS | NO. 77 |
| | | AMEETTHNDETRTLHHRIVEGEVMKDYKAIASIIEVNP | |
| | | NPNGHGSIVTWSIEYEKMNEDSPTPFAYLEFFHQNLVD | |
| | | MNSHLYVGSDSHLHVDE | |
| | P. rhoeas | MAPHGVSDLSGKLVTELEVSCDADKYYKIYKHAEDV | SEQ. ID. |
| | | QKAVPHLCTDVKVINGDATLSGCIKEWHYILEGKALS | NO. 78 |
| | | AKEETTINDETRTLHHRVLEGDMMKDYKKFDSVIEVN | |
| | | PKPNGNGSVVTRSIAYEKINEDSPTPFAYILFSHRAVED | |
| | | MNKYLCDSE | |
| | P. rhoeas | MAPHGVSDLSGKLVTELEVSCDADKYYKIYKHAEDV | SEQ. ID. |
| | | QKAVPHLCTDVKVINGDATLSGCIKEWHYILEGKALS | NO. 79 |
| | | AKEETTINDETRTLHHRVLEGDMMKDYKKFDSVIEVN | |
| | | PKPNGNGSVVTRSIAYEKINEDPAPFAYLAFFHQNAVE | |
| | | VNSYLCLSE | |
| | P. rhoeas | MAPHGVSDLSGKLVTELEVSCDADKYYKIYKHAEDV | SEQ. ID. |
| | | QKAVPHLCTDVKVINGDATLSGCIKEWHYILEGKALS | NO. 80 |
| | | AKEETTINDETRTLHHRVLEGDMMKDYKKFDSVIEVN | |
| | | PKPNGNGSVVTRSIAYEKINEDSSSLCVSSFLPSERG | |
| | P. rhoeas | MAHHGVSGLVGKLVTQLEVNCDADKFYKMAKHHED | SEQ. ID. |
| | | VPKAVPHFFTAVKVTEGDGLVSGCIKEWDYILEGKAM | NO. 81 |
| | | SCKEEEETTHYDETRTLHHRVFGGDMMMDYKKFDAII | |
| | | EVNPKPNVHGCIVTWSIAYEKINEDSPVPFDYLAFYHQ | |
| | | NIIDVGSHLCSE | |
| | P. somniferum | MDSVSAALVFHSSIYLCAMAHHGVSGLVGKIVTELEV | SEQ. ID. |
| | | NCNADEFYKILKRDEDVPRAVSDLFPPVKIAKGDGLVS | NO. 82 |
| | | GCIKEWDCVLDGKAMSGKEETTHNDETRTLRHRELE | |
| | | GDLMKDYKKFDSIIEVNPKPNGHGSIVTWSIEYEKMNE | |
| | | DSPAPFAYLASFHQNVVEVDSHLCLSE | |
| | P. somniferum | MAHHGVSGLVGKIVTELEVNCNADEFYKILKRDEDVP | SEQ. ID. |
| | | RAVSDLFPPVKIAKGDGLVSGCIKEWDCVLDGKAMSG | NO. 83 |
| | | KEETTHNDETRTLRHRELEGDLMKDYKKFDSIIEVNPK | |
| | | PNGHGSIVTWSIEYEKMNEDSPAPFAYLASFHQNVVE | |
| | | VDSHLCLSE | |
| | P. somniferum | MAHHGISGLVGKLVTQLEVNCDADEFYKIWKHHEEV | SEQ. ID. |
| | | PKAVSHLLPAVKVVKGDGLVSGCIKEWHYILEGKAMS | NO. 84 |
| | | AMEETTHNDETRTLHHQVVEGELMKDYKAIASIIQVN | |
| | | PNGSIVTWSIEYEKMNEDSPTPFAYLEFFHQNIIDMNSH | |
| | | LYVGSDSHLHVDE | |
| | P. somniferum | MAHHGVSGLVGKLVTELEVHCNADAYYKIFKHQEDV | SEQ. ID. |
| | | PKAMPHLYTGGKVISGDATRSGCIKEWNYILEGKALIA | NO. 85 |
| | | VEETTHDDETRTLTHRITGGDLTKDYKKFVKIVEVNPK | |
| | | PNGHGSIVTVSLVYEKMNEGSPTPFNYLQFVHQTIVGL | |
| | | NSHICAS | |
| | P. somniferum | MAHHGISGLVGKLVIGLEVNCDADKYYQIFKHAEDVQ | SEQ. ID. |
| | | KAVPHHYDSIKVINGDAKSSGCIKEWNFIHEGKTFHTV | NO. 86 |
| | | EETTHNDETRTLHHRIFEGDLMKDYKKFDLIIEANPKP | |
| | | TGNGCVVTWTIEYEKINQDSPAPIAYLPFCNQVIEDMN | |
| | | KHLCDSE | |

TABLE 4
Example amino acid sequences of morphinan alkaloid reducing enzymes.

| Sequence | | | SEQ. ID. |
|---|---|---|---|
| Name | Description | Sequence | NO. |
| COR | | | |
| | P. somniferum | MESNGVPMITLSSGIRMPALGMGTAETMVKGTERE | SEQ. ID. |
| | COR 1.3 | KLAFLKAIEVGYRHFDTAAAYQSEECLGEAIAEALQ | NO. 87 |
| | | LGLIKSRDELFITSKLWCADAHADLVLPALQNSLRN | |
| | | LKLDYLDLYLIHHPVSLKPGKFVNEIPKDHILPMDY | |
| | | KSVWAAMEECQTLGFTRAIGVCNFSCKKLQELMA | |
| | | AAKIPPVVNQVEMSPTLHQKNLREYCKANNIMITA | |
| | | HSVLGAICAPWGSNAVMDSKVLHQIAVARGKSVA | |
| | | QVSMRWVYQQGASLVVKSFNEGRMKENLKIFDWE | |
| | | LTAENMEKISEIPQSRTSSADFLLSPTGPFKTEEEFW | |
| | | DEKD | |
| | P. somniferum | MESNGVPMITLSSGIRMPALGMGTVETMEKGTERE | SEQ. ID. |
| | | KLAFLKAIEVGYRRFDTAAAYQTEECLGEAIAEALQ | NO. 88 |
| | | LGLIKSRDELFITSKLWCADAHADLVLPALQNSLRN | |
| | | LKLDYLDLYLIHHPVSLKPGKFVNEIPKDHILPMDY | |
| | | KSVWAAMEECQTLGFTRAIGVCNFSCKKLQELMAT | |
| | | ANSPPVVNQVEMSPTLHQKNLREYCKANNIMITAH | |
| | | SVLGAIGAPWGSNAVMDSKVLHQIAVARGKSVAQ | |
| | | VSMRWVYQQGASLVVKSFNEARMKENLKIFDWEL | |
| | | TAEDMEKISEIPQSRTSSAAFLLSPTGPFKTEEEFWD | |
| | | EKD | |
| | P. somniferum | MESNGVPMITLSSGIRMPALGMGTAETMVKGTERE | SEQ. ID. |
| | | KLAFLKAIEVGYRHFDTAAAYQSEECLGEAIAEALQ | NO. 89 |
| | | LGLIKSRDELFITSKLWCADAHADLVLPALQNSLRN | |
| | | LKLDYLDLYLIHHPVSLKPGKFVNEIPKDHILPMDY | |
| | | KSVWAAMEECQTLGFTRAIGVCNFSCKKLQELMAT | |
| | | ANSPPVVNQVEMSPTLHQKNLREYCKANNIMITAH | |
| | | SVLGAVGAAWGTNAVMHSKVLHQIAVARKSVAQ | |
| | | VSMRWVYQQGASLVVKSFNEARMKEDLKIFDWEL | |
| | | TAEDMEKISEIPQSRTSSAAFLLSPTGPFKTEEEFWD | |
| | | EKD | |
| | P. somniferum | MESNGVPMITLSSGIRMPALGMGTVETMEKGTERE | SEQ. ID. |
| | | KLAFLKAIEVGYRHFDTAAAYQTEECLGEAIAEALQ | NO. 90 |
| | | LGLIKSRDELFITSKLWCADAHADLVLPALQNSLRN | |
| | | LKLDYLDLYLIHHPVSLKPGKFVNEIPKDHILPMDY | |
| | | KSVWAAMEECQTLGFTRAIGVCNFSCKKLQELMAT | |
| | | ANSPPVVNRVEMSPTLHQKNLREYCKANNIMITAH | |
| | | SVLGAVGAAWGTNAVMHSKVLHQIAVARGKSVA | |
| | | QVSMRWVYQQGASLVVKSFNEARMKENLKIFDWE | |
| | | LTAEDMEKISEIPQSRTSSAAFLLSPTGPFKTEEEFW | |
| | | DEKD | |
| | P. somniferum | MESNGVPMITLSSGIRMPALGMGTAETMVKGTERE | SEQ. ID. |
| | | KLAFLKAIEVGYRHFDTAAAYQSEECLGEAIAEALQ | NO. 91 |
| | | LGLIKSRDELFITSKLWCADAHADLVLPALQNSLRN | |
| | | LKLEYLDLYLIHHPVSLKPGKFVNEIPKDHILPMDY | |
| | | KSVWAAMEECQTLGFTRAIGVCNFSCKKLQELMAT | |
| | | ANSPPVVNQVEMSPTLHQKNLREYCKANNIMITAH | |
| | | SVLGAVGAAWGTNAVMHSKVLHQIAVARGKSVA | |
| | | QVSMRWVYQQGASLVVKSFNEARMKENLKIFDWE | |
| | | LTAEDVEKISEIPQSRTSSAAFLLSPTGPFKTEEEFWD | |
| | | EKD | |
| | P. somniferum | MESNGVPMITLSSGIRMPALGMGTVETMEKGTERE | SEQ. ID. |
| | | KLAFLKAIEVGYRHFDTAAAYQTEECLGEAIAEALQ | NO. 92 |
| | | LGLIKSRDELFITSKLWCADAHADLVLPALQNSLRN | |
| | | LKLDYLDLYLIHHPVSLKPGKFVNEIPKDHILPMDY | |
| | | KSVWAAMEECQTLGFTRAIGVCNFSCKKLQELMAT | |
| | | ANSPPVVNQVEMSPTLHQKNLREYCKANNIMITAH | |
| | | SVLGAVGAAWGTNAVMHSKVLHQIAVARGKSVA | |
| | | QVSMRWVYQQGASLVVKSFNEARMKENLKIFDWE | |
| | | LTAEDMEKISEIPQSRTSSADFLLSPTGPFKTEEEFW | |
| | | DEKD | |
| | P. setigerum | MESNGVPMITLSSGIRMPALGMGTVETMEKGTERE | SEQ. ID. |
| | | KLAFLKAIEVGYRHFDTAAAYQTEECLGEAIAEALQ | NO. 93 |
| | | LGLIKSRDELFITSKLWCADAHADLVLPALQNSLRN | |
| | | LKLDYLDLYLIRHPVSLKPGKFVNEIPKDHILPMDY | |
| | | KSVWAAMEECQTLGFTRAIGVCNFSCKKLQELMAT | |
| | | VNSPPVVNQVEMSPTLHQKNLREYCKANNIMITAH | |
| | | SVLGAVGAAWGTKAVMHSKVLHQIAVARGKSVA | |
| | | QVSMRWVYQQGASLVVKSFNEARMKENLKIFDWE | |
| | | LTAEDMEKISEIPQSRTSSAAFLLSPTGPFKTEEEFW | |
| | | DEKD | |
| | P. bracteatum | MESNGVPMITLSSGIRMPALGMGTVETMEKGTERE | SEQ. ID. |
| | | KLAFLKAIEVGYRHFDTAAAYQTEECLGEAIAEALQ | NO. 94 |
| | | LGLIKSREELFITSKLWCTDAHADLVLPALQNSLRN | |
| | | LKLEYLDLYLIHFPVSLKPGKIVSDIPKDQMLPMDY | |
| | | KSVWVAMEECQTLGFTRAIGVSNFSCKKLQELMAT | |
| | | ANSPPVVNEVEMSPVFQQKNLRAYCKANNIMITAY | |
| | | SVLGARGAAWGSNAVMDSKVLHEIAVARGKSVAQ | |
| | | VSMRWVYQQGACLVVKSFNEERMKENLKIFDWEL | |
| | | SAEDMEMISEIPQCRTSSADFLLSPTGPFKTEEEFWD | |
| | | EKD | |
| | P. somniferum | MESNGVPMITLSSGIRMPALGMGTAETMVKGAERE | SEQ. ID. |
| | COR 1.3 | KLAFLKAIEVGYRHFDTAAAYQSEECLGEAIAEALQ | NO. 95 |
| | Mutant | LGLIKSRDELFITSKLWCADAHADLVLPALQNSLRN | |
| | | LKLDYLDLYLIHHPVSLKPGKFVNEIPKDHILPMDY | |
| | | KSVWAAMEECQTLGFTRAIGVCNFSCKKLQELMA | |
| | | AAKIPPVVNQVEMSPTLHQKNLREYCKANNIMITA | |
| | | HSVLGAICAPWGSNAVMDSKVLHQIAVARGKSVA | |
| | | QVSMRWVYQQGASLVVKSFNEGRMKENLKIFDWE | |
| | | LTAENMEKISEIPQSRTSSADFLLSPTGPFKTEEEFW | |
| | | DEKD | |
| | P. somniferum | MESNGVPMITLSSGIRMPALGMGTAETMVKGTERE | SEQ. ID. |
| | COR 1.3 | KLAFLKAIEVGYRHFDTAAAYQSEECLGEAIAEALQ | NO. 96 |
| | Mutant | LGLIKSRDELFITSKLWCADAHADLVLPALQNSLRN | |
| | | LKLDYLDLYLIHHPVSLKPGKFVNEIPKDHILPMDY | |
| | | KSVWAAMEECQTLGFTRAIGVCNFSCKKLQELMA | |
| | | AAKIPPVVNQVEMSPTLHQKNLREYCKANNIMITA | |
| | | HSVLGAICAPWGSNAVMDFKVLHQIAVARGKSVA | |
| | | QVSMRWVYQQGASLVVKSFNEGRMKENLKIFDWE | |
| | | LTAENMEKISEIPQSRTSSADFLLSPTGPFKTEEEFW | |
| | | DEKD | |

### BisBIA Generating Modifications

[0238] Some methods, processes, and systems provided herein describe the increased production of bisbenzylisoquinoline alkaloids (bisBIAs) by utilizing two separate epimerase enzymes derived from a parent epimerase enzyme when compared to production of the bisBIAs by utilizing a corresponding fused enzyme. In some examples, a corresponding fused enzyme comprises a fused epimerase having corresponding oxidase and reductase regions to the two separate epimerase enzymes. In some examples, the two separate epimerase enzymes may comprise an oxidase and a reductase. BisBIAs are dimeric molecules that may be formed by coupling reactions between two BIA monomers. In some examples, bisBIAs may be formed by carbon-oxygen coupling reactions. In other examples, bisBIAs may be formed by carbon-carbon coupling reactions. In some examples, the bisBIA dimeric molecule is a homodimer, comprising two identical BIA monomers. In some examples, an engineered host cell may produce one BIA monomer. In these examples, the BIA monomers may form homodimers when contacted with one or more coupling enzymes. In other examples, the bisBIA dimeric molecule is a heterodimer, comprising two different BIA monomers. For example, a bisBIA may be a heterodimer that comprises BIA monomers that are enantiomers of each other. In some examples, an engineered host cell may produce two or more BIA monomers. In these examples, the BIA monomers may form homodimers and heterodimers when contacted with one or more coupling enzymes.

[0239] Some of these methods, processes, and systems that describe the production of bisBIAs may comprise an engineered host cell. In some examples, the engineered host cell may be engineered to produce BIA monomers which, in turn, may be used as building block molecules for forming bisBIAs. Examples of BIA monomers that may be used to form bisBIAs include coclaurine, N-methylcoclaurine, laudanine, norcoclaurine, norlaudanosoline, 6-O-methyl-norlaudanosoline, 3′-hydroxy-N-methylcoclaurine, 3′-hydroxycoclaurine, reticuline, norreticuline, norlaudanine, laudanosine, and papaverine. In particular, engineered host cells may synthesize BIA monomers from norcoclaurine or norlaudanosoline by expression of heterologous enzymes including O-methyltransferases, N-methyltransferases, and 3′-hydroxylases. Examples of O-methyltransferases may include norcoclaurine 6-O-methyltransferase (6OMT). Further examples of O-methyltransferases may include catechol O-methyltransferase (COMT). Further examples of N-methyltransferases may include coclaurine N-methyltransferase (CNMT). Examples of 3′hydroxylases may include N-methylcoclaurine 3′-hydroxylase (CYP80B1).

[0240] The engineered host cells may produce either (S) or (R) enantiomers of various BIA monomers. Additionally or alternatively, the engineered host cells may produce a mixture of both enantiomers. The ratio of (S) and (R) enantiomers may be determined by the substrate and product specificities of the one or more enzymes that synthesize the BIA monomers. Alternatively, the amount of each enantiomer present may be modified by the expression and engagement of the two separate oxidase and reductase enzymes of the engineered epimerase that performs the epimerization of one stereoisomer into another. In some cases, the amount of each enantiomer present may be modified by the expression and engagement of the engineered fused epimerase that performs the epimerization of one stereoisomer into another.

[0241] These BIA monomers may be fused into a dimeric bisBIA scaffold. In particular, the BIA monomers may be fused into a dimeric bisBIA scaffold utilizing one or more enzymes that are produced by the engineered host cell. Additionally or alternatively, the BIA monomers may be fused into a dimeric bisBIA scaffold utilizing one or more enzymes that are provided to the BIA monomers from a source that is external to the engineered host cell. The one or more enzymes may be used to form carbon-oxygen and/or carbon-carbon coupling reactions to fuse two BIA monomers at one, two, or three positions. In some examples, two BIA monomers may be linked by an ether bridge. In some examples, a direct carbon-carbon bond may be used to connect the two BIA monomers. In some examples, a bisBIA that is formed by fusing two BIA monomers may comprise one diphenyl ether linkage. In some examples, two BIA monomers may be fused to form a bisBIA that comprises two diphenyl ether linkages. In some examples, a bisBIA that is formed from two BIA monomers may comprise three diphenyl ether linkages. In some examples, the bisBIA may comprise one diphenyl ether linkage and one benzyl phenyl ether linkage. In some cases, the bisBIA may comprise one benzyl phenyl ether linkage and two diphenyl ether linkages.

[0242] In some examples, the BIA monomers may be contacted with a sufficient amount of the one or more enzymes that may be used to form coupling reactions to fuse two BIA monomers such that at least 10%, at least 15%, at least 20%, at least 25%, at least 30%, at least 35%, at least 40%, at least 45%, at least 50%, at least 55%, at least 60%, at least 65%, at least 70%, at least 75%, at least 80%, at least 82%, at least 84%, at least 86%, at least 88%, at least 90%, at least 91%, at least 92%, at least 93%, at least 94%, at least 95%, at least 96%, at least 97%, at least 98%, at least 99%, at least 99.5%, at least 99.7%, or 100% of said BIA monomers are converted to bisBIAs. The one or more enzymes that may be used to dimerize the BIA monomers into bisBIAs may contact the BIA monomers in vitro. Additionally, or alternatively, the one or more enzymes that may be used to dimerize the BIA monomers into bisBIAs may contact the BIA monomers in vivo. Additionally, the one or more bisBIA dimerizing enzyme may be expressed in a host cell that produces BIA monomers. Alternatively, the BIA monomers may be provided to the engineered host cell that expresses the bisBIA dimerizing enzyme. Alternatively, the one or more bisBIA dimerizing enzymes may be provided to a cell having BIA monomers within.

[0243] In some examples, the bisbenzylisoquinoline alkaloid is a compound of any one of Formulas Va-Vu:

[chemical structure]

[chemical structure]

[chemical structure]

[chemical structure]

[chemical structure]

[chemical structure]

[0244] or a salt thereof, wherein:
[0245] R^{1a}, R^{2a}, and R^{2b} are independently selected from hydrogen and C₁-C₄ alkyl;
[0246] R^{3a}, R^{3b}, R^{6a}, R^{6b}, R^{8a}, and R^{8b} are independently selected from hydrogen, hydroxy, fluoro, chloro, bromo, carboxaldehyde, C₁-C₄ acyl, C₁-C₄ alkyl, and C₁-C₄ alkoxy;

[0247] R^{4a} and R^{5a} are independently selected from hydrogen and C₁-C₄ alkyl, or R^{4a} and R^{5a} together form a methylene bridge;

[0248] R^{4b} and R^{5b} are independently selected from hydrogen and C₁-C₄ alkyl, or R^{4b} and R^{5b} together form a methylene bridge; and

[0249] R^{7a}, R^{7b}, and R^{9a} are independently selected from hydrogen and C₁-C₄ alkyl.

[0250] In some examples, R^{1a} and R^{1b} are each hydrogen; R^{2a} and R^{2b} are each methyl; R^{3a} and R^{3b} are each hydrogen; R^{4a} and R^{5a} are independently hydrogen or methyl; R^{4b} and R^{5b} are independently hydrogen or methyl, or R^{4b} and R^{5b} together form a methylene bridge; R^{6a}, R^{6b}, R^{8a}, and R^{8b} are each hydrogen; and R^{7a}, R^{7b}, and R^{9a} are independently hydrogen or methyl.

[0251] As illustrated above, the bisBIA compounds of Formulas Va, Vb, and Vd are formed by fusing two BIA monomers using a carbon-oxygen coupling reaction. Additionally, the bisBIA compounds of Formulas Vc, Vf, and Vh are formed by fusing two BIA monomers using both a carbon-oxygen coupling reaction and a carbon-carbon coupling reaction. Further, the bisBIA compounds of Formulas Ve, Vg, Vi, Vj, Vk, Vl, Vm, Vo, Vp, and Vq are formed by fusing two BIA monomers using two carbon-oxygen coupling reactions. The bisBIA compound of Formula Vn is formed by fusing two BIA monomers using two carbon-oxygen coupling reactions and a carbon-carbon coupling reaction. Additionally, the bisBIA compound of Formula Vr is formed by fusing two BIA monomers using three carbon-oxygen coupling reactions.

[0252] The one or more enzymes that may be used to form the coupling reactions may include known cytochrome P450s such as Berberis stolonifera CYP80A1 or similar cytochrome P450 enzymes from other plants that naturally synthesize these compounds. Alternatively, the coupling reaction may be performed by an enzyme that is not a cytochrome P450. The one or more enzymes that may be used to form the coupling reactions may be engineered to accept non-native substrates. Accordingly, the one or more enzymes that may be used to form the coupling reactions may be used to generate non-natural bisBIA molecules. In some examples, the one or more enzymes may fuse a natural BIA monomer with a non-natural BIA monomer to produce a non-natural bisBIA molecule. In other examples, the one or more enzymes may fuse two non-natural BIA monomers to produce a non-natural bisBIA molecule. Enzyme engineered strategies may be used to identify one or more enzymes that may be used to form the coupling reactions that fuse BIA monomers to produce bisBIAs. In some examples, enzyme engineering strategies may include site directed mutagenesis, random mutagenesis and screening, DNA shuffling, and screening.

[0253] Once bisBIAs are formed, the bisBIAs may be further derivatized or modified. The bisBIAs may be derivatized or modified utilizing one or more enzymes that are produced by the engineered host cell. In particular, the bisBIAs may be derivatized or modified by contacting the bisBIAs with one or more enzymes that are produced by the engineered host cell. Additionally or alternatively, the bisBIAs may be derivatized or modified by contacting the bisBIAs with one or more enzymes that are provided to the bisBIAs from a source that is external to the engineered host cell. The one or more enzymes that may be used to derivatize or modify the bisBIAs may be used to perform tailoring reactions. Examples of tailoring reactions include oxidation, reduction, O-methylation, N-methylation, O-demethylation, acetylation, methylenedioxybridge formation, and O,O-demethylenation. A bisBIA may be derivatized or modified using one or more tailoring reactions.

[0254] Examples of tailoring reactions are provided in Tables 5 and 11. In some examples, tailoring enzymes may be used to catalyze carbon-carbon coupling reactions performed on a bisBIA, or a derivative thereof. Examples of tailoring enzymes that may be used to catalyze carbon-carbon coupling reactions include a Berberine bridge enzyme (BBE) from Papaver somniferum, Eschscholzia californica, Coptis japonica, Berberis stolonifer, Thalictrum flavum, or another species; Salutaridine synthase (SalSyn) from Papaver somniferum or another species; and Corytuberine synthase (CorSyn) from Coptis japonica or another species. Non-limiting examples of reactions that can be catalyzed by tailoring enzymes are shown in Scheme 4, wherein R^{a}, R^{b}, R^{c}, and R^{d} are independently selected from hydrogen, hydroxy, fluoro, chloro, bromo, carboxaldehyde, C₁-C₄ acyl, C₁-C₄ alkyl, and C₁-C₄ alkoxy. In some examples, R^{a}, R^{b}, and the carbon atoms to which they are attached optionally form a carbocycle or heterocycle. In some examples, R^{c}, R^{d}, and the carbon atoms to which they are attached optionally form a carbocycle or heterocycle.

[chemical structure]

[0255] In some examples, tailoring enzymes may be used to catalyze oxidation reactions performed on a bisBIA, or a derivative thereof. Examples of tailoring enzymes that may be used to catalyze oxidation reactions include a Tetrahydroprotoberberine oxidase (STOX) from Coptis japonica, Argemone mexicana, Berberis wilsonae, or another species; Dihydrobenzophenanthridine oxidase (DBOX) from Papaver somniferum or another species; Methylstylopine hydroxylase (MSH) from Papaver somniferum or another species; and Protopine 6-hydroxylase (P6H) from Papaver somniferum, Eschscholzia californica, or another species.

[0256] Tailoring enzymes may also be used to catalyze methylenedioxy bridge formation reactions performed on a bisBIA, or a derivative thereof. Examples of tailoring enzymes that may be used to catalyze methylenedioxy bridge formation reactions include a Stylopine synthase (StySyn) from Papaver somniferum, Eschscholzia californica, Argemone mexicana, or another species; Cheilanthifoline synthase (CheSyn) from Papaver somniferum, Eschscholzia californica, Argemone mexicana, or another species; and Canadine synthase (CAS) from Thalictrum flavum, Coptis chinensis, or another species.

[0257] In other examples, tailoring enzymes may be used to catalyze O-methylation reactions performed on a bisBIA, or a derivative thereof. Examples of tailoring enzymes that may be used to catalyze O-methylation reactions include a Norcoclaurine 6-O-methyltransferase (6OMT) from Papaver somniferum, Thalictrum flavum, Coptis japonica, Papaver bracteatum, or another species; 3′hydroxy-N-methylcoclaurine 4′-O-methyltransferase (4′OMT) from Papaver somniferum, Thalictrum flavum, Coptis japonica, Coptis chinensis, or another species; Reticuline 7-O-methyltransferase (7OMT) from Papaver somniferum, Eschscholzia californica, or another species; and Scoulerine 9-O-methyltransferase (9OMT) from Papaver somniferum, Thalictrum flavum, Coptis japonica, Coptis chinensis, or another species.

[0258] Additionally, tailoring enzymes may be used to catalyze N-methylation reactions performed on a bisBIA, or a derivative thereof. Examples of tailoring enzymes that may be used to catalyze N-methylation reactions include Coclaurine N-methyltransferase (CNMT) from Papaver somniferum, Thalictrum flavum, Coptis japonica, or another species; Tetrahydroprotoberberine N-methyltransferase (TNMT) from Papaver somniferum, Eschscholzia californica, Papaver bracteatum, or another species.

[0259] Further, tailoring enzymes may be used to catalyze O-demethylation reactions performed on a bisBIA, or a derivative thereof. Examples of tailoring enzymes that may be used to catalyze O-demethylation reactions include Thebaine demethylase (T6ODM) from Papaver somniferum or another species; and Codeine demethylase (CODM) from Papaver somniferum, or another species.

[0260] Tailoring enzymes may also be used to catalyze reduction reactions performed on a bisBIA, or a derivative thereof. Examples of tailoring enzymes that may be used to catalyze reduction reactions include Salutaridine reductase (SalR) from Papaver somniferum, Papaver bracteatum, or another species; Codeinone reductase (COR) from Papaver somniferum or another species; and Sanguinarine reductase (SanR) from Eschscholzia californica or another species. In other examples, tailoring enzymes may be used to catalyze acetylation reactions performed on a bisBIA, or a derivative thereof. An example of a tailoring enzyme that may be used to catalyze acetylation reactions includes Salutaridine acetyltransferase (SalAT) from Papaver somniferum or another species.

### O-Demethylation Modifications

[0261] Some methods, processes, and systems provided herein describe the conversion of a first benzylisoquinoline alkaloid to a second benzylisoquinoline alkaloid by the removal of an O-linked methyl group. Some of these methods, processes, and systems may comprise an engineered host cell. In some examples, the conversion of a first benzylisoquinoline alkaloid to a second benzylisoquinoline alkaloid is a key step in the conversion of a substrate to a nor-opioids or nal-opioids. In some examples, the conversion of a first alkaloid to a second alkaloid comprises a demethylase reaction.

[0262] FIG. 12 illustrates an enzyme having opioid 3-O-demethylase (ODM) activity, in accordance with some embodiments of the invention. Specifically, the enzyme may act on morphinan alkaloid structures to remove the methyl group from the oxygen bound to carbon 3.

[0263] Examples of amino acid sequences of ODM enzymes are set forth in Table 6. An amino acid sequence for an ODM that is utilized in converting a first alkaloid to a second alkaloid may be 50% or more identical to a given amino acid sequence as listed in Table 6. For example, an amino acid sequence for such an epimerase may comprise an amino acid sequence that is at least 50% or more, 55% or more, 60% or more, 65% or more, 70% or more, 75% or more, 80% or more, 81% or more, 82% or more, 83% or more, 84% or more, 85% or more, 86% or more, 87% or more, 88% or more, 89% or more, 90% or more, 91% or more, 92% or more, 93% or more, 94% or more, 95% or more, 96% or more, 97% or more, 98% or more, or 99% or more identical to an amino acid sequence as provided herein. Additionally, in certain embodiments, an “identical” amino acid sequence contains at least 80%-99% identity at the amino acid level to the specific amino acid sequence. In some cases an “identical” amino acid sequence contains at least about 85%, 86%, 87%, 88%, 89%, 90%, 91%, 92%, 93%, 94% and more in certain cases, at least 95%, 96%, 97%, 98% and 99% identity, at the amino acid level. In some cases, the amino acid sequence may be identical but the DNA sequence is altered such as to optimize codon usage for the host organism, for example.

[0264] An engineered host cell may be provided that produces an ODM that converts a first alkaloid to a second alkaloid, wherein the ODM comprises a given amino acid sequence as listed in Table 6. An engineered host cell may be provided that produces one or more ODM enzymes. The ODM that is produced within the engineered host cell may be recovered and purified so as to form a biocatalyst. The process may include contacting the first alkaloid with an ODM in an amount sufficient to convert said first alkaloid to a second alkaloid. In some examples, the first alkaloid may be contacted with a sufficient amount of the one or more enzymes such that at least 5% of said first alkaloid is converted to a second alkaloid. In further examples, the first alkaloid may be contacted with a sufficient amount of the one or more enzymes such that at least 10%, at least 15%, at least 20%, at least 25%, at least 30%, at least 35%, at least 40%, at least 45%, at least 50%, at least 55%, at least 60%, at least 65%, at least 70%, at least 75%, at least 80%, at least 82%, at least 84%, at least 86%, at least 88%, at least 90%, at least 91%, at least 92%, at least 93%, at least 94%, at least 95%, at least 96%, at least 97%, at least 98%, at least 99%, at least 99.5%, at least 99.7%, or 100% of said first alkaloid is converted to a second alkaloid.

[0265] The one or more enzymes that may be used to convert a first alkaloid to a second alkaloid may contact the first alkaloid in vitro. Additionally, or alternatively, the one or more enzymes that may be used to convert a first alkaloid to a second alkaloid may contact the first alkaloid in vivo. In some examples, the one or more enzymes that may be used to convert a first alkaloid to a second alkaloid may be provided to a cell having the first alkaloid within. In some examples, the one or more enzymes that may be used to convert a first alkaloid to a second alkaloid may be produced within an engineered host cell.

[0266] In some examples, the methods provide for engineered host cells that produce an alkaloid product, wherein the O-demethylation of a substrate to a product may comprise a key step in the production of an alkaloid product. In some examples, the alkaloid produced is a nor-opioid or a nal-opioid. In still other embodiments, the alkaloid produced is derived from a nor-opioid or a nal-opioid. In another embodiment, a first alkaloid is an intermediate toward the product of the engineered host cell. In still other embodiments, the alkaloid product is selected from the group consisting of morphine, oxymorphine, oripavine, hydromorphone, dihydromorphine, 14-hydroxymorphine, morphinone, and 14-hydroxymorphinone.

[0267] In some examples, the substrate alkaloid is an opioid selected from the group consisting of codeine, oxycodone, thebaine, hydrocodone, dihydrocodeine, 14-hydroxycodeine, codeinone, and 14-hydroxycodeinone.

### N-Demethylation Modifications

[0268] Some methods, processes, and systems provided herein describe the conversion of a first alkaloid to a second alkaloid by the removal of an N-linked methyl group. Some of these methods, processes, and systems may comprise an engineered host cell. In some examples, the conversion of a first alkaloid to a second alkaloid is a key step in the conversion of a substrate to a nor-opioids or nal-opioids. In some examples, the conversion of a first alkaloid to a second alkaloid comprises a demethylase reaction.

[0269] FIG. 13 illustrates an enzyme having opioid N-demethylase activity, in accordance with some embodiments of the invention. Specifically, the enzyme may act on morphinan alkaloid structures to remove the methyl group from the nitrogen.

[0270] Examples of an amino acid sequence of an N-demethylase (NDM) enzyme that may be used to perform the conversion a first alkaloid to a second alkaloid are provided in Table 7. An amino acid sequence for an NDM that is utilized in converting a first alkaloid to a second alkaloid may be 50% or more identical to a given amino acid sequence as listed in Table 7. For example, an amino acid sequence for such an epimerase may comprise an amino acid sequence that is at least 50% or more, 55% or more, 60% or more, 65% or more, 70% or more, 75% or more, 80% or more, 81% or more, 82% or more, 83% or more, 84% or more, 85% or more, 86% or more, 87% or more, 88% or more, 89% or more, 90% or more, 91% or more, 92% or more, 93% or more, 94% or more, 95% or more, 96% or more, 97% or more, 98% or more, or 99% or more identical to an amino acid sequence as provided herein. Additionally, in certain embodiments, an “identical” amino acid sequence contains at least 80%-99% identity at the amino acid level to the specific amino acid sequence. In some cases an “identical” amino acid sequence contains at least about 85%, 86%, 87%, 88%, 89%, 90%, 91%, 92%, 93%, 94% and more in certain cases, at least 95%, 96%, 97%, 98% and 99% identity, at the amino acid level. In some cases, the amino acid sequence may be identical but the DNA sequence is altered such as to optimize codon usage for the host organism, for example.

[0271] An engineered host cell may be provided that produces an NDM that converts a first alkaloid to a second alkaloid, wherein the NDM comprises an amino acid sequence as listed in Table 7. An engineered host cell may be provided that produces one or more NDM enzymes. The NDM that is produced within the engineered host cell may be recovered and purified so as to form a biocatalyst. The process may include contacting the first alkaloid with an NDM in an amount sufficient to convert said first alkaloid to a second alkaloid. In some examples, the first alkaloid may be contacted with a sufficient amount of the one or more enzymes such that at least 5% of said first alkaloid is converted to a second alkaloid. In further examples, the first alkaloid may be contacted with a sufficient amount of the one or more enzymes such that at least 10%, at least 15%, at least 20%, at least 25%, at least 30%, at least 35%, at least 40%, at least 45%, at least 50%, at least 55%, at least 60%, at least 65%, at least 70%, at least 75%, at least 80%, at least 82%, at least 84%, at least 86%, at least 88%, at least 90%, at least 91%, at least 92%, at least 93%, at least 94%, at least 95%, at least 96%, at least 97%, at least 98%, at least 99%, at least 99.5%, at least 99.7%, or 100% of said first alkaloid is converted to a second alkaloid.

[0272] The one or more enzymes that may be used to convert a first alkaloid to a second alkaloid may contact the first alkaloid in vitro. Additionally, or alternatively, the one or more enzymes that may be used to convert a first alkaloid to a second alkaloid may contact the first alkaloid in vivo. In some examples, the one or more enzymes that may be used to convert a first alkaloid to a second alkaloid may be provided to a cell having the first alkaloid within. In some examples, the one or more enzymes that may be used to convert a first alkaloid to a second alkaloid may be produced within an engineered host cell.

[0273] In some examples, the methods provide for engineered host cells that produce an alkaloid product, wherein the N-demethylation of a substrate to a product may comprise a key step in the production of an alkaloid product. In some examples, the alkaloid produced is a nor-opioid or a nal-opioid. In still other embodiments, the alkaloid produced is derived from a nor-opioid or a nal-opioid. In another embodiment, a first alkaloid is an intermediate toward the product of the engineered host cell. In still other embodiments, the alkaloid product is selected from the group consisting of norcodeine, noroxycodone, northebaine, norhydrocodone, nordihydro-codeine, nor-14-hydroxy-codeine, norcodeinone, nor-14-hydroxy-codeinone, normorphine, noroxymorphone, nororipavine, norhydro-morphone, nordihydro-morphine, nor-14-hydroxy-morphine, normorphinone, and nor-14-hydroxy-morphinone.

[0274] In some examples, the substrate alkaloid is an opioid selected from the group consisting of codeine, oxycodone, thebaine, hydrocodone, dihydrocodeine, 14-hydroxycodeine, codeinone, 14-hydroxycodeinone, morphine, oxymorphone, oripavine, hydromorphone, dihydromorphine, 14-hydroxy-morphine, morphinone, and 14-hydroxy-morphinone.

### N-Methyltransferase Modifications

[0275] Some methods, processes, and systems provided herein describe the conversion of a first alkaloid to a second alkaloid by the addition of an N-linked sidechain group. Some methods, processes, and systems provided herein describe the conversion of a first alkaloid to a second alkaloid by the transfer of a sidechain group from a cosubstrate to the first alkaloid. Some of these methods, processes, and systems may comprise an engineered host cell. In some examples, the conversion of a first alkaloid to a second alkaloid is a key step in the conversion of a substrate to a nal-opioid. In some examples, the conversion of a first alkaloid to a second alkaloid comprises a methyltransferase reaction.

[0276] FIG. 18 illustrates an enzyme having N-methyltransferase (NMT) activity, in accordance with some embodiments of the invention. Specifically, the enzyme may act on morphinan alkaloid structures to add a methyl group or other carbon moiety to the nitrogen. S-Adenosyl methionine (SAM) may act as the donor of the functional group (methyl, allyl, cyclopropylmethyl, or other).

[0277] Examples of amino acid sequences of NMT enzymes are set forth in Table 8. An amino acid sequence for an NMT that is utilized in converting a first alkaloid to a second alkaloid may be 50% or more identical to a given amino acid sequence as listed in Table 8. For example, an amino acid sequence for such an epimerase may comprise an amino acid sequence that is at least 50% or more, 55% or more, 60% or more, 65% or more, 70% or more, 75% or more, 80% or more, 81% or more, 82% or more, 83% or more, 84% or more, 85% or more, 86% or more, 87% or more, 88% or more, 89% or more, 90% or more, 91% or more, 92% or more, 93% or more, 94% or more, 95% or more, 96% or more, 97% or more, 98% or more, or 99% or more identical to an amino acid sequence as provided herein. Additionally, in certain embodiments, an “identical” amino acid sequence contains at least 80%-99% identity at the amino acid level to the specific amino acid sequence. In some cases an “identical” amino acid sequence contains at least about 85%, 86%, 87%, 88%, 89%, 90%, 91%, 92%, 93%, 94% and more in certain cases, at least 95%, 96%, 97%, 98% and 99% identity, at the amino acid level. In some cases, the amino acid sequence may be identical but the DNA sequence is altered such as to optimize codon usage for the host organism, for example.

[0278] An engineered host cell may be provided that produces an NMT that converts a first alkaloid to a second alkaloid, wherein the NMT comprises an amino acid sequence as provided in Table 8. An engineered host cell may be provided that produces one or more NMT enzymes. The NMT that is produced within the engineered host cell may be recovered and purified so as to form a biocatalyst. The process may include contacting the first alkaloid with an NMT in an amount sufficient to convert said first alkaloid to a second alkaloid. In some examples, the first alkaloid may be contacted with a sufficient amount of the one or more enzymes such that at least 5% of said first alkaloid is converted to a second alkaloid. In further examples, the first alkaloid may be contacted with a sufficient amount of the one or more enzymes such that at least 10%, at least 15%, at least 20%, at least 25%, at least 30%, at least 35%, at least 40%, at least 45%, at least 50%, at least 55%, at least 60%, at least 65%, at least 70%, at least 75%, at least 80%, at least 82%, at least 84%, at least 86%, at least 88%, at least 90%, at least 91%, at least 92%, at least 93%, at least 94%, at least 95%, at least 96%, at least 97%, at least 98%, at least 99%, at least 99.5%, at least 99.7%, or 100% of said first alkaloid is converted to a second alkaloid.

[0279] The one or more enzymes that may be used to convert a first alkaloid to a second alkaloid may contact the first alkaloid in vitro. Additionally, or alternatively, the one or more enzymes that may be used to convert a first alkaloid to a second alkaloid may contact the first alkaloid in vivo. In some examples, the one or more enzymes that may be used to convert a first alkaloid to a second alkaloid may be provided to a cell having the first alkaloid within. In some examples, the one or more enzymes that may be used to convert a first alkaloid to a second alkaloid may be produced within an engineered host cell.

[0280] In some examples, the methods provide for engineered host cells that produce an alkaloid product, wherein the N-methyltransferase of a substrate to a product may comprise a key step in the production of an alkaloid product. In some examples, the alkaloid produced is a nal-opioid. In still other embodiments, the alkaloid produced is derived from a nor-opioid or a nal-opioid. In another embodiment, a first alkaloid is an intermediate toward the product of the engineered host cell. In still other embodiments, the alkaloid product is selected from the group including naloxone, naltrexone, and nalmefene.

[0281] In some examples, the substrate alkaloid is an opioid selected from the group consisting of norcodeine, noroxycodone, northebaine, norhydrocodone, nordihydro-codeine, nor-14-hydroxy-codeine, norcodeinone, nor-14-hydroxy-codeinone, normorphine, noroxymorphone, nororipavine, norhydro-morphone, nordihydro-morphine, nor-14-hydroxy-morphine, normorphinone, and nor-14-hydroxy-morphinone. In some examples, the cosubstrate is S-adenosylmethionine, allyl-S-adenosylmethionine, or cyclopropylmethyl-S-adenosylmethionine.

### Heterologous Coding Sequences

[0282] In some instances, the engineered host cells harbor one or more heterologous coding sequences (such as two or more, three or more, four or more, five or more) which encode activity(ies) that enable the engineered host cells to produce desired enzymes of interest and/or BIAs of interest, e.g., as described herein. As used herein, the term “heterologous coding sequence” is used to indicate any polynucleotide that codes for, or ultimately codes for, a peptide or protein or its equivalent amino acid sequence, e.g., an enzyme, that is not normally present in the host organism and may be expressed in the host cell under proper conditions. As such, “heterologous coding sequences” includes multiple copies of coding sequences that are normally present in the host cell, such that the cell is expressing additional copies of a coding sequence that are not normally present in the cells. The heterologous coding sequences may be RNA or any type thereof, e.g., mRNA, DNA or any type thereof, e.g., cDNA, or a hybrid of RNA/DNA. Coding sequences of interest include, but are not limited to, full-length transcription units that include such features as the coding sequence, introns, promoter regions, 3′-UTRs, and enhancer regions.

[0283] In some examples, the engineered host cells may comprise a plurality of heterologous coding sequences each encoding an enzyme, such as an enzyme listed in Table 5. In some examples, the plurality of enzymes encoded by the plurality of heterologous coding sequences may be distinct from each other. In some examples, some of the plurality of enzymes encoded by the plurality of heterologous coding sequences may be distinct from each other and some of the plurality of enzymes encoded by the plurality of heterologous coding sequences may be duplicate copies.

[0284] In some examples, the heterologous coding sequences may be operably connected. Heterologous coding sequences that are operably connected may be within the same pathway of producing a particular benzylisoquinoline alkaloid product and/or epimerase product. In some examples, the operably connected heterologous coding sequences may be directly sequential along the pathway of producing a particular benzylisoquinoline alkaloid product and/or epimerase product. In some examples, the operably connected heterologous coding sequences may have one or more native enzymes between one or more of the enzymes encoded by the plurality of heterologous coding sequences. In some examples, the heterologous coding sequences may have one or more heterologous enzymes between one or more of the enzymes encoded by the plurality of heterologous coding sequences. In some examples, the heterologous coding sequences may have one or more non-native enzymes between one or more of the enzymes encoded by the plurality of heterologous coding sequences.

[0285] The engineered host cells may also be modified to possess one or more genetic alterations to accommodate the heterologous coding sequences. Alterations of the native host genome include, but are not limited to, modifying the genome to reduce or ablate expression of a specific protein that may interfere with the desired pathway. The presence of such native proteins may rapidly convert one of the intermediates or final products of the pathway into a metabolite or other compound that is not usable in the desired pathway. Thus, if the activity of the native enzyme were reduced or altogether absent, the produced intermediates would be more readily available for incorporation into the desired product.

[0286] Heterologous coding sequences include but are not limited to sequences that encode enzymes, either wild-type or equivalent sequences, that are normally responsible for the production of BIAs of interest in plants. In some cases, the enzymes for which the heterologous sequences code may be any of the enzymes in the 1-benzylisoquinoline alkaloid pathway, and may be from any convenient source. The choice and number of enzymes encoded by the heterologous coding sequences for the particular synthetic pathway may be selected based upon the desired product. In certain embodiments, the host cells of the invention may include 1 or more, 2 or more, 3 or more, 4 or more, 5 or more, 6 or more, 7 or more, 8 or more, 9 or more, 10 or more, 11 or more, 12 or more, 13 or more, 14 or more, or even 15 or more heterologous coding sequences, such as 1, 2, 3, 4, 5, 6, 7, 8, 9, 10, 11, 12, 13, 14, or 15 heterologous coding sequences.

[0287] As used herein, the term “heterologous coding sequences” also includes the coding portion of the peptide or enzyme, i.e., the cDNA or mRNA sequence, of the peptide or enzyme, as well as the coding portion of the full-length transcriptional unit, i.e., the gene including introns and exons, as well as “codon optimized” sequences, truncated sequences or other forms of altered sequences that code for the enzyme or code for its equivalent amino acid sequence, provided that the equivalent amino acid sequence produces a functional protein. Such equivalent amino acid sequences may have a deletion of one or more amino acids, with the deletion being N-terminal, C-terminal, or internal. Truncated forms are envisioned as long as they have the catalytic capability indicated herein. Fusions of two or more enzymes are also envisioned to facilitate the transfer of metabolites in the pathway, provided that catalytic activities are maintained.

[0288] Operable fragments, mutants, or truncated forms may be identified by modeling and/or screening. In some cases, this is achieved by deletion of, for example, N-terminal, C-terminal, or internal regions of the protein in a step-wise fashion, followed by analysis of the resulting derivative with regard to its activity for the desired reaction compared to the original sequence. If the derivative in question operates in this capacity, it is considered to constitute an equivalent derivative of the enzyme proper.

[0289] In some examples, some heterologous proteins may show occurrences where they are incorrectly processed when expressed in a recombinant host. For example, plant proteins such as cytochrome P450 enzymes expressed in microbial production hosts may have occurrences of incorrect processing. In particular, salutaridine synthase may undergo N-linked glycosylation when heterologously expressed in yeast. This N-linked glycosylation may not be observed in plants, which may be indicative of incorrect N-terminal sorting of the nascent SalSyn transcript so as to reduce the activity of the enzyme in the heterologous microbial host. In such examples, protein engineering directed at correcting N-terminal sorting of the nascent transcript so as to remove the N-linked glycosylation pattern may result in improved activity of the salutaridine synthase enzyme in the recombinant production host.

[0290] Aspects of the invention also relate to heterologous coding sequences that code for amino acid sequences that are equivalent to the native amino acid sequences for the various enzymes. An amino acid sequence that is “equivalent” is defined as an amino acid sequence that is not identical to the specific amino acid sequence, but rather contains at least some amino acid changes (deletions, substitutions, inversions, insertions, etc.) that do not essentially affect the biological activity of the protein as compared to a similar activity of the specific amino acid sequence, when used for a desired purpose. The biological activity refers to, in the example of an epimerase, its catalytic activity. Equivalent sequences are also meant to include those which have been engineered and/or evolved to have properties different from the original amino acid sequence. Mutable properties of interest include catalytic activity, substrate specificity, selectivity, stability, solubility, localization, etc.

[0291] In some instances, the expression of each type of enzyme is increased through additional gene copies (i.e., multiple copies), which increases intermediate accumulation and/or BIA of interest production. Some embodiments of the invention include increased BIA of interest production in a host cell through simultaneous expression of multiple species variants of a single or multiple enzymes. In some cases, additional gene copies of a single or multiple enzymes are included in the host cell. Any convenient methods may be utilized including multiple copies of a heterologous coding sequence for an enzyme in the host cell.

[0292] In some examples, the engineered host cell includes multiple copies of a heterologous coding sequence for an enzyme, such as 2 or more, 3 or more, 4 or more, 5 or more, or even 10 or more copies. In certain embodiments, the engineered host cell includes multiple copies of heterologous coding sequences for one or more enzymes, such as multiple copies of two or more, three or more, four or more, etc. In some cases, the multiple copies of the heterologous coding sequence for an enzyme are derived from two or more different source organisms as compared to the host cell. For example, the engineered host cell may include multiple copies of one heterologous coding sequence, where each of the copies is derived from a different source organism. As such, each copy may include some variations in explicit sequences based on inter-species differences of the enzyme of interest that is encoded by the heterologous coding sequence.

[0293] In certain embodiments, the engineered host cell includes multiple copies of heterologous coding sequences for one or more enzymes, such as multiple copies of two or more, three or more, four or more, etc. In some cases, the multiple copies of the heterologous coding sequence for an enzyme are derived from two or more different source organisms as compared to the host cell. For example, the engineered host cell may include multiple copies of one heterologous coding sequence, where each of the copies is derived from a different source organism. As such, each copy may include some variations in explicit sequences based on inter-species differences of the enzyme of interest that is encoded by the heterologous coding sequence.

[0294] The engineered host cell medium may be sampled and monitored for the production of BIAs of interest. The BIAs of interest may be observed and measured using any convenient methods. Methods of interest include, but are not limited to, LC-MS methods (e.g., as described herein) where a sample of interest is analyzed by comparison with a known amount of a standard compound. Additionally, there are other ways that BIAs of interest may be observed and/or measured. Examples of alternative ways of observing and/or measuring BIAs include GC-MS, UV-vis spectroscopy, NMR, LC-NMR, LC-UV, TLC, capillary electrophoresis, among others. Identity may be confirmed, e.g., by m/z and MS/MS fragmentation patterns, MRM transitions, and quantitation or measurement of the compound may be achieved via LC trace peaks of know retention time and/or EIC MS peak analysis by reference to corresponding LC-MS analysis of a known amount of a standard of the compound. In some cases, identity may be confirmed via multiple reaction monitoring using mass spectrometry.

[0295] Additionally, a culture of the engineered host cell may be sampled and monitored for the production of enzymes of interest, such as a neopinone isomerase enzyme. The enzymes of interest may be observed and measured using any convenient methods. Methods of interest include enzyme activity assays, polyacrylamide gel electrophoresis, carbon monoxide spectroscopy, and western blot analysis.

### Methods

### Methods for Culturing Host Cells for BIA Production

[0296] As summarized above, some aspects of the invention include methods of preparing benzylisoquinoline alkaloids (BIAs) of interest. Additionally, some aspects of the invention include methods of preparing enzymes of interest. As such, some aspects of the invention include culturing an engineered host cell under conditions in which the one or more host cell modifications (e.g., as described herein) are functionally expressed such that the cell converts starting compounds of interest into product enzymes and/or BIAs of interest. Also provided are methods that include culturing an engineered host cell under conditions suitable for protein production such that one or more heterologous coding sequences are functionally expressed and convert starting compounds of interest into product enzymes or BIAs of interest. In some examples, the method is a method of preparing a benzylisoquinoline alkaloid (BIA) that includes culturing an engineered host cell (e.g., as described herein); adding a starting compound to the cell culture; and recovering the BIA from the cell culture. In some examples, the method is a method of preparing an enzyme that includes culturing an engineered host cell (e.g., as described herein); adding a starting compound to the cell culture; and recovering the enzyme from the cell culture.

[0297] Fermentation media may contain suitable carbon substrates. The source of carbon suitable to perform the methods of this disclosure may encompass a wide variety of carbon containing substrates. Suitable substrates may include, without limitation, monosaccharides (e.g., glucose, fructose, galactose, xylose), oligosaccharides (e.g., lactose, sucrose, raffinose), polysaccharides (e.g., starch, cellulose), or a combination thereof. In some cases, unpurified mixtures from renewable feedstocks may be used (e.g., cornsteep liquor, sugar beet molasses, barley malt). In some cases, the carbon substrate may be a one-carbon substrate (e.g., methanol, carbon dioxide) or a two-carbon substrate (e.g., ethanol). In other cases, other carbon containing compounds may be utilized, for example, methylamine, glucosamine, and amino acids.

[0298] Any convenient methods of culturing engineered host cells may be employed for producing the enzymes and/or BIAs of interest. The particular protocol that is employed may vary, e.g., depending on the engineered host cell, the heterologous coding sequences, the enzymes of interest, the BIAs of interest, etc. The engineered host cells may be present in any convenient environment, such as an environment in which the engineered host cells are capable of expressing one or more functional heterologous enzymes. In some embodiments, the engineered host cells are cultured under conditions that are conducive to enzyme expression and with appropriate substrates available to allow production of enzymes and/or BIAs of interest in vivo. In some embodiments, the functional enzymes are extracted from the engineered host for production of enzymes and/or BIAs of interest under in vitro conditions. In some instances, the engineered host cells are placed back into a multicellular host organism. The engineered host cells are in any phase of growth, including, but not limited to, stationary phase and log-growth phase, etc. In addition, the cultures themselves may be continuous cultures or they may be batch cultures.

[0299] Cells may be grown in an appropriate fermentation medium at a temperature between 14-40° C. Cells may be grown with shaking at any convenient speed (e.g., 200 rpm). Cells may be grown at a suitable pH. Suitable pH ranges for the fermentation may be between pH 5-9. Fermentations may be performed under aerobic, anaerobic, or microaerobic conditions. Any suitable growth medium may be used. Suitable growth media may include, without limitation, common commercially prepared media such as synthetic defined (SD) minimal media or yeast extract peptone dextrose (YEPD) rich media. Any other rich, defined, or synthetic growth media appropriate to the microorganism may be used.

[0300] Cells may be cultured in a vessel of essentially any size and shape. Examples of vessels suitable to perform the methods of this disclosure may include, without limitation, multi-well shake plates, test tubes, flasks (baffled and non-baffled), and bioreactors. The volume of the culture may range from 10 microliters to greater than 10,000 liters.

[0301] The addition of agents to the growth media that are known to modulate metabolism in a manner desirable for the production of alkaloids may be included. In a non-limiting example, cyclic adenosine 2′3′-monophosphate may be added to the growth media to modulate catabolite repression.

[0302] Any convenient cell culture conditions for a particular cell type may be utilized. In certain embodiments, the host cells that include one or more modifications are cultured under standard or readily optimized conditions, with standard cell culture media and supplements. As one example, standard growth media when selective pressure for plasmid maintenance is not required may contain 20 g/L yeast extract, 10 g/L peptone, and 20 g/L dextrose (YPD). Host cells containing plasmids are grown in synthetic complete (SC) media containing 1.7 g/L yeast nitrogen base, 5 g/L ammonium sulfate, and 20 g/L dextrose supplemented with the appropriate amino acids required for growth and selection. Alternative carbon sources which may be useful for inducible enzyme expression include, but are not limited to, sucrose, raffinose, and galactose. Cells are grown at any convenient temperature (e.g., 30° C.) with shaking at any convenient rate (e.g., 200 rpm) in a vessel, e.g., in test tubes or flasks in volumes ranging from 1-1000 mL, or larger, in the laboratory.

[0303] Culture volumes may be scaled up for growth in larger fermentation vessels, for example, as part of an industrial process. The industrial fermentation process may be carried out under closed-batch, fed-batch, or continuous chemostat conditions, or any suitable mode of fermentation. In some cases, the engineered host cells may be immobilized on a substrate as whole cell catalysts and subjected to fermentation conditions for alkaloid production.

[0304] A batch fermentation is a closed system, in which the composition of the medium is set at the beginning of the fermentation and not altered during the fermentation process. The desired organism(s) are inoculated into the medium at the beginning of the fermentation. In some instances, the batch fermentation is run with alterations made to the system to control factors such as pH and oxygen concentration (but not carbon). In this type of fermentation system, the biomass and metabolite compositions of the system change continuously over the course of the fermentation. Cells typically proceed through a lag phase, then to a log phase (high growth rate), then to a stationary phase (growth rate reduced or halted), and eventually to a death phase (if left untreated). In additional cases, the batch fermentation system may be opened at certain times to add additional substrates for fermentating the desired organism. In particular, in some cases, a fermentation system may include a fed batch reactor.

[0305] A continuous fermentation is an open system, in which a defined fermentation medium is added continuously to the bioreactor and an equal amount of fermentation media is continuously removed from the vessel for processing. Continuous fermentation systems are generally operated to maintain steady state growth conditions, such that cell loss due to medium being removed must be balanced by the growth rate in the fermentation. Continuous fermentations are generally operated at conditions where cells are at a constant high cell density. Continuous fermentations allow for the modulation of one or more factors that affect target product concentration and/or cell growth.

[0306] The liquid medium may include, but is not limited to, a rich or synthetic defined medium having an additive component described above. Media components may be dissolved in water and sterilized by heat, pressure, filtration, radiation, chemicals, or any combination thereof. Several media components may be prepared separately and sterilized, and then combined in the fermentation vessel. The culture medium may be buffered to aid in maintaining a constant pH throughout the fermentation.

[0307] Process parameters including temperature, dissolved oxygen, pH, stirring, aeration rate, and cell density may be monitored or controlled over the course of the fermentation. For example, temperature of a fermentation process may be monitored by a temperature probe immersed in the culture medium. The culture temperature may be controlled at the set point by regulating the jacket temperature. Water may be cooled in an external chiller and then flowed into the bioreactor control tower and circulated to the jacket at the temperature required to maintain the set point temperature in the vessel.

[0308] Additionally, a gas flow parameter may be monitored in a fermentation process. For example, gases may be flowed into the medium through a sparger. Gases suitable for the methods of this disclosure may include compressed air, oxygen, and nitrogen. Gas flow may be at a fixed rate or regulated to maintain a dissolved oxygen set point.

[0309] The pH of a culture medium may also be monitored. In some examples, the pH may be monitored by a pH probe that is immersed in the culture medium inside the vessel. If pH control is in effect, the pH may be adjusted by acid and base pumps which add each solution to the medium at the required rate. The acid solutions used to control pH may be sulfuric acid or hydrochloric acid. The base solutions used to control pH may be sodium hydroxide, potassium hydroxide, or ammonium hydroxide.

[0310] Further, dissolved oxygen may be monitored in a culture medium by a dissolved oxygen probe immersed in the culture medium. If dissolved oxygen regulation is in effect, the oxygen level may be adjusted by increasing or decreasing the stirring speed. The dissolved oxygen level may also be adjusted by increasing or decreasing the gas flow rate. The gas may be compressed air, oxygen, or nitrogen.

[0311] Stir speed may also be monitored in a fermentation process. In some examples, the stirrer motor may drive an agitator. The stirrer speed may be set at a consistent rpm throughout the fermentation or may be regulated dynamically to maintain a set dissolved oxygen level.

[0312] Additionally, turbidity may be monitored in a fermentation process. In some examples, cell density may be measured using a turbidity probe. Alternatively, cell density may be measured by taking samples from the bioreactor and analyzing them in a spectrophotometer. Further, samples may be removed from the bioreactor at time intervals through a sterile sampling apparatus. The samples may be analyzed for alkaloids produced by the host cells. The samples may also be analyzed for other metabolites and sugars, the depletion of culture medium components, or the density of cells.

[0313] In another example, a feed stock parameter may be monitored during a fermentation process. In particular, feed stocks including sugars and other carbon sources, nutrients, and cofactors that may be added into the fermentation using an external pump. Other components may also be added during the fermentation including, without limitation, anti-foam, salts, chelating agents, surfactants, and organic liquids.

[0314] Any convenient codon optimization techniques for optimizing the expression of heterologous polynucleotides in host cells may be adapted for use in the subject host cells and methods, see e.g., Gustafsson, C. et al. (2004) Trends Biotechnol, 22, 346-353, which is incorporated by reference in its entirety.

[0315] The subject method may also include adding a starting compound to the cell culture. Any convenient methods of addition may be adapted for use in the subject methods. The cell culture may be supplemented with a sufficient amount of the starting materials of interest (e.g., as described herein), e.g., a mM to μM amount such as between about 1-5 mM of a starting compound. It is understood that the amount of starting material added, the timing and rate of addition, the form of material added, etc., may vary according to a variety of factors. The starting material may be added neat or pre-dissolved in a suitable solvent (e.g., cell culture media, water, or an organic solvent). The starting material may be added in concentrated form (e.g., 10× over desired concentration) to minimize dilution of the cell culture medium upon addition. The starting material may be added in one or more batches, or by continuous addition over an extended period of time (e.g., hours or days).

Methods for Isolating Products from the Fermentation Medium

[0316] The subject methods may also include recovering the enzymes and/or BIAs of interest from the cell culture. Any convenient methods of separation and isolation (e.g., chromatography methods or precipitation methods) may be adapted for use in the subject methods to recover the enzymes and/or BIAs of interest from the cell culture. Filtration methods may be used to separate soluble from insoluble fractions of the cell culture. In some cases, liquid chromatography methods (e.g., reverse phase HPLC, size exclusion, normal phase chromatography) may be used to separate the BIA of interest from other soluble components of the cell culture. In some cases, extraction methods (e.g., liquid extraction, pH based purification, solid phase extraction, affinity chromatography, ion exchange, etc.) may be used to separate the enzymes and/or BIAs of interest from other components of the cell culture.

[0317] The produced alkaloids may be isolated from the fermentation medium using methods known in the art. A number of recovery steps may be performed immediately after (or in some instances, during) the fermentation for initial recovery of the desired product. Through these steps, the alkaloids (e.g., BIAs) may be separated from the engineered host cells, cellular debris and waste, and other nutrients, sugars, and organic molecules may remain in the spent culture medium. This process may be used to yield a BIA-enriched product.

[0318] In an example, a product stream having a benzylisoquinoline alkaloid (BIA) product is formed by providing engineered yeast cells and a feedstock including nutrients and water to a batch reactor. In particular, the engineered yeast cells may be subjected to fermentation by incubating the engineered yeast cells for a time period of at least about 5 minutes to produce a solution comprising the BIA product and cellular material. Once the engineered yeast cells have been subjected to fermentation, at least one separation unit may be used to separate the BIA product from the cellular material to provide the product stream comprising the BIA product. In particular, the product stream may include the BIA product as well as additional components, such as a clarified yeast culture medium. Additionally, a BIA product may comprise one or more BIAs of interest, such as one or more BIA compounds.

[0319] Different methods may be used to remove cells from a bioreactor medium that include an enzyme and/or BIA of interest. In some examples, cells may be removed by sedimentation over time. This process of sedimentation may be accelerated by chilling or by the addition of fining agents such as silica. The spent culture medium may then be siphoned from the top of the reactor or the cells may be decanted from the base of the reactor. Alternatively, cells may be removed by filtration through a filter, a membrane, or other porous material. Cells may also be removed by centrifugation, for example, by continuous flow centrifugation or by using a continuous extractor.

[0320] If some valuable enzymes and/or BIAs of interest are present inside the engineered host cells, the engineered host cells may be permeabilized or lysed and the cell debris may be removed by any of the methods described above. Agents used to permeabilize the engineered host cells may include, without limitation, organic solvents (e.g., DMSO) or salts (e.g., lithium acetate). Methods to lyse the engineered host cells may include the addition of surfactants such as sodium dodecyl sulfate, or mechanical disruption by bead milling or sonication.

[0321] Enzymes and/or BIAs of interest may be extracted from the clarified spent culture medium through liquid-liquid extraction by the addition of an organic liquid that is immiscible with the aqueous culture medium. In some examples, the use of liquid-liquid extraction may be used in addition to other processing steps. Examples of suitable organic liquids include, but are not limited to, isopropyl myristate, ethyl acetate, chloroform, butyl acetate, methylisobutyl ketone, methyl oleate, toluene, oleyl alcohol, ethyl butyrate. The organic liquid may be added to as little as 10% or as much as 100% of the aqueous medium. The organic liquid may be as little as 10%, may be 100%, may be 200%, may be 300%, may be 400%, may be 500%, may be 600%, may be 700%, may be 800%, may be 900%, may be 1000%, may be more than 1000%, or may be a percentage in between those listed herein of the volume of the aqueous liquid.

[0322] In some cases, the organic liquid may be added at the start of the fermentation or at any time during the fermentation. This process of extractive fermentation may increase the yield of enzymes and/or BIAs of interest from the host cells by continuously removing enzymes and/or BIAs to the organic phase.

[0323] Agitation may cause the organic phase to form an emulsion with the aqueous culture medium. Methods to encourage the separation of the two phases into distinct layers may include, without limitation, the addition of a demulsifier or a nucleating agent, or an adjustment of the pH. The emulsion may also be centrifuged to separate the two phases, for example, by continuous conical plate centrifugation.

[0324] Alternatively, the organic phase may be isolated from the aqueous culture medium so that it may be physically removed after extraction. For example, the solvent may be encapsulated in a membrane.

[0325] In some examples, enzymes and/or BIAs of interest may be extracted from a fermentation medium using adsorption methods. In some examples, BIAs of interest may be extracted from clarified spent culture medium by the addition of a resin such as Amberlite® XAD4 or another agent that removes BIAs by adsorption. The BIAs of interest may then be released from the resin using an organic solvent. Examples of suitable organic solvents include, but are not limited to, methanol, ethanol, ethyl acetate, or acetone.

[0326] BIAs of interest may also be extracted from a fermentation medium using filtration. At high pH, the BIAs of interest may form a crystalline-like precipitate in the bioreactor. This precipitate may be removed directly by filtration through a filter, membrane, or other porous material. The precipitate may also be collected by centrifugation and/or decantation.

[0327] The extraction methods described above may be carried out either in situ (in the bioreactor) or ex situ (e.g., in an external loop through which media flows out of the bioreactor and contacts the extraction agent, then is recirculated back into the vessel). Alternatively, the extraction methods may be performed after the fermentation is terminated using the clarified medium removed from the bioreactor vessel.

Methods for Purifying Products from Alkaloid-Enriched Solutions

[0328] Subsequent purification steps may involve treating the post-fermentation solution enriched with BIA product(s) of interest using methods known in the art to recover individual product species of interest to high purity.

[0329] In one example, BIAs of interest extracted in an organic phase may be transferred to an aqueous solution. In some cases, the organic solvent may be evaporated by heat and/or vacuum, and the resulting powder may be dissolved in an aqueous solution of suitable pH. In a further example, the BIAs of interest may be extracted from the organic phase by addition of an aqueous solution at a suitable pH that promotes extraction of the BIAs of interest into the aqueous phase. The aqueous phase may then be removed by decantation, centrifugation, or another method.

[0330] The BIA-containing solution may be further treated to remove metals, for example, by treating with a suitable chelating agent. The BIA of interest-containing solution may be further treated to remove other impurities, such as proteins and DNA, by precipitation. In one example, the BIA of interest-containing solution is treated with an appropriate precipitation agent such as ethanol, methanol, acetone, or isopropanol. In an alternative example, DNA and protein may be removed by dialysis or by other methods of size exclusion that separate the smaller alkaloids from contaminating biological macromolecules.

[0331] In further examples, the solution containing BIAs of interest may be extracted to high purity by continuous cross-flow filtration using methods known in the art.

[0332] If the solution contains a mixture of BIAs of interest, it may be subjected to acid-base treatment to yield individual BIA of interest species using methods known in the art. In this process, the pH of the aqueous solution is adjusted to precipitate individual BIAs.

[0333] For high purity, small-scale preparations, the BIAs may be purified in a single step by liquid chromatography.

### Liquid Chromatography Mass Spectrometry (LCMS) Method

[0334] The BIA compounds of interest, including 1-benzylisoquinoline alkaloids, bisbenzylisoquinoline alkaloids, promorphinan alkaloids, morphinan alkaloids, nal-opioids, and nor-opioids, may be separated using liquid chromatography, and detected and quantified using mass spectrometry. Compound identity may be confirmed by characteristic elution time, mass-to-charge ratio (m/z) and fragmentation patterns (MS/MS). Quantitation may be performed by comparison of compound peak area to a standard curve of a known reference standard compound. Additionally, BIAs of interest may be detected by alternative methods such as GC-MS, UV-vis spectroscopy, NMR, LC-NMR, LC-UV, TLC, and capillary electrophoresis.

### Purpald Assay Method

[0335] For high throughput screening of demethylation reactions a purpald assay may be used. For example, demethylation catalyzed by 2-oxoglutarate dependent dioxygenases produces formaldehyde a as product as shown in the generalized chemical equation: [substrate]+2-oxoglutarate+O₂⇄[product]+formaldehyde+succinate+CO₂. Purpald reagent in alkaline conditions undergoes a color change in the presence of formaldehyde that can be quantified to concentrations as low as 1 nM with a spectrophotometer at 510 nm.

### Yeast-Derived Alkaloid APIs Versus Plant-Derived APIs

[0336] The clarified yeast culture medium (CYCM) may contain a plurality of impurities. The clarified yeast culture medium may be dehydrated by vacuum and/or heat to yield an alkaloid-rich powder. This product is analogous to the concentrate of poppy straw (CPS) or opium, which is exported from poppy-growing countries and purchased by API manufacturers. For the purposes of this invention, CPS is a representative example of any type of purified plant extract from which the desired alkaloids product(s) may ultimately be further purified. Tables 12 and 13 highlight the impurities in these two products that may be specific to either CYCM or CPS or may be present in both. While some BIAs may have a pigment as an impurity, other BIAs may be categorized as pigments themselves. Accordingly, these BIAs may be assessed for impurities based on non-pigment impurities. By analyzing a product of unknown origin for a subset of these impurities, a person of skill in the art could determine whether the product originated from a yeast or plant production host.

[0337] API-grade pharmaceutical ingredients are highly purified molecules. As such, impurities that could indicate the plant- or yeast-origin of an API (such as those listed in Tables 12 and 13) may not be present at the API stage of the product. Indeed, many of the API products derived from yeast strains of some embodiments of the present invention may be largely indistinguishable from the traditional plant-derived APIs. In some cases, however, conventional alkaloid compounds may be subjected to chemical modification using chemical synthesis approaches, which may show up as chemical impurities in plant-based products that require such chemical modifications. For example, chemical derivatization may often result in a set of impurities related to the chemical synthesis processes. In certain situations, these modifications may be performed biologically in the yeast production platform, thereby avoiding some of the impurities associated with chemical derivation from being present in the yeast-derived product. In particular, these impurities from the chemical derivation product may be present in an API product that is produced using chemical synthesis processes but may be absent from an API product that is produced using a yeast-derived product. Alternatively, if a yeast-derived product is mixed with a chemically-derived product, the resulting impurities may be present but in a lesser amount than would be expected in an API that only or primarily contains chemically-derived products. In this example, by analyzing the API product for a subset of these impurities, a person of skill in the art could determine whether the product originated from a yeast production host or the traditional chemical derivatization route.

[0338] Non-limiting examples of impurities that may be present in chemically-derivatized morphinan APIs but not in biosynthesized APIs include a codeine-O(6)-methyl ether impurity in API codeine; 8,14-dihydroxy-7,8-dihydrocodeinone in API oxycodone; and tetrahydrothebaine in API hydrocodone. The codeine-O(6)-methyl ether may be formed by chemical over-methylation of morphine. The 8,14-dihydroxy-7,8-dihydrocodeinone in API oxycodone may be formed by chemical over-oxidation of thebaine. Additionally, the tetrahydrothebaine in API hydrocodone may be formed by chemical over-reduction of thebaine.

[0339] However, in the case where the yeast-derived compound and the plant-derived compound are both subjected to chemical modification through chemical synthesis approaches, the same impurities associated with the chemical synthesis process may be expected in the products. In such a situation, the starting material (e.g., CYCM or CPS) may be analyzed as described above.

### Host Cell Derived Nal-Opioids Vs Chemically Derived Nal-Opioids

[0340] Nal-opioids produced by chemical synthesis may contain a plurality of impurities. These impurities may arise from many different causes, for example, unreacted starting materials, incomplete reactions, the formation of byproducts, persistence of intermediates, dimerization, or degradation. An example of an unreacted starting material could be oxymorphone remaining in a preparation of naltrexone. An example of an impurity arising from an incomplete reaction could be 3-O-Methylbuprenorphine resulting from the incomplete 3-O-demethylation of thebaine. Chemical modification can result in the addition or removal of functional groups at off-target sites. For example, the oxidation of C10 to create 10-hydroxynaltrexone and 10-ketonaltrexone during naltrexone synthesis, or the removal of the 6-O-methyl group to give 6-O-desmethylbuprenorphine during buprenorphine synthesis. Impurites may arise from the persistence of reaction intermediates, for example the persistence of N-oxides like oxymorphone N-oxide formed during the N-demethylation process. Another source of impurities is dimerization, the conjugation of two opioid molecules, for example two buprenorphine molecules (2,2′-bisbuprenorphine), two naltrexone molecules (2,2′-bisnaltrexone), or two naloxone molecules (2,2′-bisnaloxone). Impurities may arise from degradation of starting materials, reaction intermediates, or reaction products. The extreme physical conditions used in chemical syntheses may make the presence of degradation more likely. An example of an impurity that may arise from degradation is dehydrobuprenorphine produced by oxidizing conditions during buprenorphine synthesis.

[0341] Nal-opioids produced by enzyme catalysis in a host cell may contain different impurities than nal-opioids produced by chemical synthesis. Nal-opioids produced by enzyme catalysis in a host cell may contain fewer impurities than nal-opioids produced by chemical synthesis. Nal-opioids produced by enzyme catalysis in a host cell may lack certain impurities that are found in nal-opioids produced by chemical synthesis. In some examples, key features of enzyme synthesis may include, (1) enzymes target a specific substrate and residue with high fidelity; (2) enzymes perform reactions in the mild physiological conditions within the cell which do not compromise the stability of the molecules; and (3) enzymes are engineered to be efficient catalysts that drive reactions to completion.

[0342] Table 14 highlights some of the impurities that may be specific to chemically produced nal-opioids. Accordingly, nal-opioids may be assessed for impurities to determine the presence or absence of any impurity from Table 14. By analyzing a product of unknown origin for a subset of these impurities, a person of skill in the art could determine whether the product originated from a chemical or enzymatic synthesis.

### Methods of Engineering Host Cells

[0343] Also included are methods of engineering host cells for the purpose of producing enzymes and/or BIAs of interest. Inserting DNA into host cells may be achieved using any convenient methods. The methods are used to insert the heterologous coding sequences into the engineered host cells such that the host cells functionally express the enzymes and convert starting compounds of interest into product enzymes and/or BIAs of interest.

[0344] Any convenient promoters may be utilized in the subject engineered host cells and methods. The promoters driving expression of the heterologous coding sequences may be constitutive promoters or inducible promoters, provided that the promoters are active in the engineered host cells. The heterologous coding sequences may be expressed from their native promoters, or non-native promoters may be used. Such promoters may be low to high strength in the host in which they are used. Promoters may be regulated or constitutive. In certain embodiments, promoters that are not glucose repressed, or repressed only mildly by the presence of glucose in the culture medium, are used. Promoters of interest include but are not limited to, promoters of glycolytic genes such as the promoter of the B. subtilis tsr gene (encoding the promoter region of the fructose bisphosphate aldolase gene) or the promoter from yeast S. cerevisiae gene coding for glyceraldehyde 3-phosphate dehydrogenase (GPD, GAPDH, or TDH3), the ADH1 promoter of baker's yeast, the phosphate-starvation induced promoters such as the PHOS promoter of yeast, the alkaline phosphatase promoter from B. licheniformis, yeast inducible promoters such as Gall-10, Gall, GalL, GalS, repressible promoter Met25, tetO, and constitutive promoters such as glyceraldehyde 3-phosphate dehydrogenase promoter (GPD), alcohol dehydrogenase promoter (ADH), translation-elongation factor-1-α promoter (TEF), cytochrome c-oxidase promoter (CYC1), MRP7 promoter, etc. Autonomously replicating yeast expression vectors containing promoters inducible by hormones such as glucocorticoids, steroids, and thyroid hormones may also be used and include, but are not limited to, the glucorticoid responsive element (GRE) and thyroid hormone responsive element (TRE). These and other examples are described in U.S. Pat. No. 7,045,290, which is incorporated by reference, including the references cited therein. Additional vectors containing constitutive or inducible promoters such as a factor, alcohol oxidase, and PGH may be used. Additionally any promoter/enhancer combination (as per the Eukaryotic Promoter Data Base EPDB) could also be used to drive expression of genes. Any convenient appropriate promoters may be selected for the host cell, e.g., E. coli. One may also use promoter selection to optimize transcript, and hence, enzyme levels to maximize production while minimizing energy resources.

[0345] Any convenient vectors may be utilized in the subject engineered host cells and methods. Vectors of interest include vectors for use in yeast and other cells. The types of yeast vectors may be broken up into 4 general categories: integrative vectors (YIp), autonomously replicating high copy-number vectors (YEp or 2μ plasmids), autonomously replicating low copy-number vectors (YCp or centromeric plasmids) and vectors for cloning large fragments (YACs). Vector DNA is introduced into prokaryotic or eukaryotic cells via any convenient transformation or transfection techniques. DNA of another source (e.g. PCR-generated double stranded DNA product, or synthesized double stranded or single stranded oligonucleotides) may be used to engineer the yeast by integration into the genome. Any single transformation event may include one or several nucleic acids (vectors, double stranded or single stranded DNA fragments) to genetically modify the host cell. Table 10 illustrates examples of convenient vectors.

### Utility

[0346] The engineered host cells and methods of the invention, e.g., as described above, find use in a variety of applications. Applications of interest include, but are not limited to: research applications and therapeutic applications. Methods of the invention find use in a variety of different applications including any convenient application where the production of enzymes and/or BIAs is of interest.

[0347] The subject engineered host cells and methods find use in a variety of therapeutic applications. Therapeutic applications of interest include those applications in which the preparation of pharmaceutical products that include BIAs is of interest. The engineered host cells described herein produce BIAs of interest and enzymes of interest. Reticuline is a major branch point intermediate of interest in the synthesis of BIAs including engineering efforts to produce end products such as opioid products. The subject host cells may be utilized to produce BIAs of interest from simple and inexpensive starting materials that may find use in the production of BIAs of interest, including reticuline, and BIA end products. As such, the subject host cells find use in the supply of therapeutically active BIAs of interest.

[0348] In some instances, the engineered host cells and methods find use in the production of commercial scale amounts of BIAs thereof where chemical synthesis of these compounds is low yielding and not a viable means for large-scale production. In certain cases, the host cells and methods are utilized in a fermentation facility that would include bioreactors (fermenters) of e.g., 5,000-200,000 liter capacity allowing for rapid production of BIAs of interest thereof for therapeutic products. Such applications may include the industrial-scale production of BIAs of interest from fermentable carbon sources such as cellulose, starch, and free sugars.

[0349] The subject engineered host cells and methods find use in a variety of research applications. The subject host cells and methods may be used to analyze the effects of a variety of enzymes on the biosynthetic pathways of a variety of enzymes and/or BIAs of interest. In addition, the engineered host cells may be engineered to produce enzymes and/or BIAs of interest that find use in testing for bioactivity of interest in as yet unproven therapeutic functions. In some cases, the engineering of host cells to include a variety of heterologous coding sequences that encode for a variety of enzymes elucidates the high yielding biosynthetic pathways towards enzymes and/or BIAs of interest. In certain cases, research applications include the production of enzymes and/or BIAs of interest for therapeutic molecules of interest that may then be further chemically modified or derivatized to desired products or for screening for increased therapeutic activities of interest. In some instances, host cell strains are used to screen for enzyme activities that are of interest in such pathways, which may lead to enzyme discovery via conversion of BIA metabolites produced in these strains.

[0350] The subject engineered host cells and methods may be used as a production platform for plant specialized metabolites. The subject host cells and methods may be used as a platform for drug library development as well as plant enzyme discovery. For example, the subject engineered host cells and methods may find use in the development of natural product based drug libraries by taking yeast strains producing interesting scaffold molecules, such as guattegaumerine, and further functionalizing the compound structure through combinatorial biosynthesis or by chemical means. By producing drug libraries in this way, any potential drug hits are already associated with a production host that is amenable to large-scale culture and production. As another example, these subject engineered host cells and methods may find use in plant enzyme discovery. The subject host cells provide a clean background of defined metabolites to express plant EST libraries to identify new enzyme activities. The subject host cells and methods provide expression methods and culture conditions for the functional expression and increased activity of plant enzymes in yeast.

### Kits and Systems

[0351] Aspects of the invention further include kits and systems, where the kits and systems may include one or more components employed in methods of the invention, e.g., engineered host cells, starting compounds, heterologous coding sequences, vectors, culture medium, etc., as described herein. In some embodiments, the subject kit includes an engineered host cell (e.g., as described herein), and one or more components selected from the following: starting compounds, a heterologous coding sequence and/or a vector including the same, vectors, growth feedstock, components suitable for use in expression systems (e.g., cells, cloning vectors, multiple cloning sites (MCS), bi-directional promoters, an internal ribosome entry site (IRES), etc.), and a culture medium.

[0352] Any of the components described herein may be provided in the kits, e.g., host cells including one or more modifications, starting compounds, culture medium, etc. A variety of components suitable for use in making and using heterologous coding sequences, cloning vectors and expression systems may find use in the subject kits. Kits may also include tubes, buffers, etc., and instructions for use. The various reagent components of the kits may be present in separate containers, or some or all of them may be pre-combined into a reagent mixture in a single container, as desired.

[0353] Also provided are systems for producing enzymes and/or BIAs of interest, where the systems may include engineered host cells including one or more modifications (e.g., as described herein), starting compounds, culture medium, a fermenter and fermentation equipment, e.g., an apparatus suitable for maintaining growth conditions for the host cells, sampling and monitoring equipment and components, and the like. A variety of components suitable for use in large scale fermentation of yeast cells may find use in the subject systems.

[0354] In some cases, the system includes components for the large scale fermentation of engineered host cells, and the monitoring and purification of enzymes and/or BIA compounds produced by the fermented host cells. In certain embodiments, one or more starting compounds (e.g., as described herein) are added to the system, under conditions by which the engineered host cells in the fermenter produce one or more desired BIA products of interest. In some instances, the host cells produce a BIA of interest (e.g., as described herein). In certain cases, the BIA products of interest are opioid products, such as thebaine, codeine, neopine, morphine, neomorphine, hydrocodone, oxycodone, hydromorphone, dihydrocodeine, 14-hydroxycodeine, dihydromorphine, and oxymorphone. In some cases, the BIA products of interest are nal-opioids, such as naltrexone, naloxone, nalmefene, nalorphine, nalorphine, nalodeine, naldemedine, naloxegol, 6β-naltrexol, naltrindole, methylnaltrexone, methylsamidorphan, alvimopan, axelopran, bevenpran, dinicotinate, levallorphan, samidorphan, buprenorphine, dezocine, eptazocine, butorphanol, levorphanol, nalbuphine, pentazocine, phenazocine, norbinaltorphimine, and diprenorphine. In some cases, the BIA products of interest are nor-opioids, such as norcodeine, noroxycodone, northebaine, norhydrocodone, nordihydro-codeine, nor-14-hydroxy-codeine, norcodeinone, nor-14-hydroxy-codeinone, normorphine, noroxymorphone, nororipavine, norhydro-morphone, nordihydro-morphine, nor-14-hydroxy-morphine, normorphinone, and nor-14-hydroxy-morphinone. In some cases, the BIA products are bisbenzylisoquinoline products, such as berbamunine, guattegaumerine, dauricine, and liensinine.

[0355] In some cases, the system includes processes for monitoring and or analyzing one or more enzymes and/or BIAs of interest compounds produced by the subject host cells. For example, a LC-MS analysis system as described herein, a chromatography system, or any convenient system where the sample may be analyzed and compared to a standard, e.g., as described herein. The fermentation medium may be monitored at any convenient times before and during fermentation by sampling and analysis. When the conversion of starting compounds to enzymes and/or BIA products of interest is complete, the fermentation may be halted and purification of the BIA products may be done. As such, in some cases, the subject system includes a purification component suitable for purifying the enzymes and/or BIA products of interest from the host cell medium into which it is produced. The purification component may include any convenient process that may be used to purify the enzymes and/or BIA products of interest produced by fermentation, including but not limited to, silica chromatography, reverse-phase chromatography, ion exchange chromatography, HIC chromatography, size exclusion chromatography, liquid extraction, and pH extraction methods. In some cases, the subject system provides for the production and isolation of enzyme and/or BIA fermentation products of interest following the input of one or more starting compounds to the system.

[0356] The following examples are put forth so as to provide those of ordinary skill in the art with a complete disclosure and description of how to make and use the present invention, and are not intended to limit the scope of what the inventors regard as their invention nor are they intended to represent that the experiments below are all or the only experiments performed. Efforts have been made to ensure accuracy with respect to numbers used (e.g. amounts, temperature, etc.), but some experimental errors and deviations should be accounted for. Unless indicated otherwise, parts are parts by weight, molecular weight is weight average molecular weight, temperature is in degrees Centigrade, and pressure is at or near atmospheric.

### Discussion of Enzyme List

[0357] The host cells may be engineered to include one or more modifications (such as two or more, three or more, four or more, five or more, or even more modifications) that provide for the production of BIAs of interest and/or enzymes of interest. Table 5 provides a list of exemplary genes that may be acted upon by one or more modifications so as to provide for the production of BIAs of interest and/or enzymes of interest in an engineered host cell.

[0358] Modifications of genes as provided in Table 5 may be used to produce BIAs of interest from engineered host cells that are supplied with a medium containing the minimal nutrients required for growth. This minimal medium may contain a carbon source, a nitrogen source, amino acids, vitamins, and salts. For example, modifications of genes as provided in Table 5 may be used to produce BIAs of interest from engineered host cells that are fed sugar. Additionally, modifications of one or more genes as provided in Table 5 may be used to augment the biosynthetic processes of host cells that may be engineered for drug production.

[0359] Additionally, the use of these modifications to provide for the production of BIAs of interest and/or enzymes of interest in engineered host cells is not readily apparent from the mere identification of enzymes that may be produced by the genes. In particular, synthetic pathways that have been reconstructed in host cells, such as yeast cells, as described herein comprise a variety of enzymes that do not act together in nature within a single organism. Additionally, some of the enzymes discussed herein do not act for BIA biosynthesis in their natural context. Further, some of the enzymes described herein are not evolved to function in particular host cells, such as yeast cells, and are not evolved to function together. In these cases, it would not be obvious that the enzymes would exhibit sufficient activity in the context of the synthetic BIA pathway in a host cell, such as yeast, to have sufficient flux through the pathway to produce downstream BIA end products.

[0360] For example, plant enzymes are often difficult to functionally express in heterologous microbial hosts, such as yeast. In many cases the enzymes may be misfolded, not correctly localized within the host cell, and/or incorrectly processed. The differences in protein translation and processing between yeast and plants can lead to these enzymes exhibiting substantially reduced to no detectable activities in the yeast host. These challenges arise commonly for endomembrane localized enzymes, such as cytochrome P450s, which are strongly represented in the BIA pathways. Even reduced enzyme activities may pose a substantial challenge to engineering yeast to produce complex BIAs, which requires sufficient activity at each step to ensure high-level accumulation of the desired BIA products.

[0361] Additionally, there are endogenous enzymes/pathways in some host cells, such as yeast, that may act on many of the early precursors in the BIA pathway (i.e., intermediates from tyrosine to norcoclaurine), and thus it may not be readily apparent that there would be sufficient flux through the heterologous pathway to achieve substantial BIA production given these competing endogenous pathways. For example, the Erlich pathway (Hazelwood, et al. 2008. Appl. Environ. Microbiol. 74: 2259-66; Larroy, et al. 2003. Chem. Biol. Interact. 143-144: 229-38; Larroy, et al. 2002. Eur. J. Biochem. 269: 5738-45) in yeast is the main endogenous pathway that would act to convert many of the intermediates in the early BIA pathway to undesired products and divert flux from the synthetic pathway.

[0362] Further, many of the enzymes as discussed herein, and as provided in Table 5, may function under very specific regulation strategies, including spatial regulation, in the native plant hosts, which may be lost upon transfer to the heterologous yeast host. In addition, plants present very different biochemical environments than yeast cells under which the enzymes are evolved to function, including pH, redox state, and substrate, cosubstrate, coenzyme, and cofactor availabilities. Given the differences in biochemical environments and regulatory strategies between the native hosts and the heterologous yeast hosts, it is not obvious that the enzymes would exhibit substantial activities when in the context of the yeast environment and further not obvious that they would work together to direct simple precursors such as sugar to complex BIA compounds Maintaining the activities of the enzymes in the yeast host is particularly important as many of the pathways have many reaction steps (>10), such that if these steps are not efficient then one would not expect accumulation of desired downstream products.

[0363] In addition, in the native plant hosts, the associated metabolites in these pathways may be localized across different cell and tissue types. In several examples, there are cell types that may be specialized for biosynthesis and cell types that may be synthesized for metabolite accumulation. This type of cell specialization may be lost when expressing the pathways within a heterologous yeast host, and may play an important role in controlling the toxicity of these metabolites on the cells. Thus, it is not obvious that yeast could be successfully engineered to biosynthesize and accumulate these metabolites without being harmed by the toxicity of these compounds.

[0364] As one example, in the native plant hosts, the enzyme BBE is reported to have dynamic subcellular localization. In particular, the enzyme BBE initially starts in the ER and then is sorted to the vacuole (Bird and Facchini. 2001. Planta. 213: 888-97). It has been suggested that the ER-association of BBE in plants (Alcantara, et al. 2005. Plant Physiol. 138: 173-83) provides the optimal basic pH (pH˜8.8) for BBE activity (Ziegler and Facchini. 2008. Annu. Rev. Plant Biol. 59: 735-69). As another example, there is evidence that sanguinarine biosynthesis occurs in specialized vesicles within plant cells (Amann, et al. 1986. Planta. 167: 310-20), but only some of the intermediates accumulate in the vesicles. This may occur so as to sequester them from other enzyme activities and/or toxic effects.

[0365] As another example, the biosynthetic enzymes in the morphinan pathway branch are all localized to the phloem, which is part of the vascular tissue in plants. In the phloem, the pathway enzymes may be further divided between two cell types: the sieve elements common to all plants, and the laticifer which is a specialized cell type present only in certain plants which make specialized secondary metabolites. The upstream enzymes (i.e., from NCS through to SalAT) are predominantly in the sieve elements, and the downstream enzymes (i.e., T6ODM, COR, CODM) are mostly in the laticifer (Onoyovwe, et al. 2013. Plant Cell. 25: 4110-22). Additionally, it was discovered that the final steps in the noscapine biosynthetic pathway take place in the laticifer (Chen and Facchini. 2014. Plant J. 77: 173-84). This compartmentalization is thought to be highly important for regulating biosynthesis by isolating or trafficking intermediates, providing optimal pH, enhancing supply of cofactors, although the nature of the poppy laticifer microenvironment is still under investigation (Ziegler and Facchini. 2008. Annu. Rev. Plant Biol. 59: 735-69). Further, it is predicted that several of the enzymes may function as multi-enzyme complexes or metabolic channels common to plant secondary metabolism (Kempe, et al. 2009. Phytochemistry. 70: 579-89; Allen, et al. 2004. Nat. Biotechnol. 22: 1559-66). When biosynthetic enzymes are combined from different hosts and/or expressed recombinantly in a heterologous yeast cell it is not clear that these complexes or channels will form as they would in the native host. In an additional example, in Coptis japonica, berberine is biosynthesized in root tissues and then accumulated within the rhizome via the action of specialized ATP-binding cassette transport proteins (Shitan, et al. 2013. Phytochemistry. 91: 109-16). In opium poppy, morphinan alkaloids are accumulated within the latex (cytoplasm of laticifer cells) (Martin, et al. 1967. Biochemistry. 6: 2355-63).

[0366] Further, even without these considerations, it is also the case that the plant enzymes for several of the steps in the pathways described herein have not yet been characterized. For example, the conversion of tyrosine to the early benzylisoquinoline alkaloid scaffold norcoclaurine has not yet been characterized. Thus, for several of the steps in the pathways described herein, alternative biosynthetic scheme were produced by bringing together enzyme activities that do not normally occur together in nature for the biosynthesis of BIAs or identifying new enzyme activities from genome sequence information to use in the reconstructed pathways.

[0367] For example, the two-step conversion of tyrosine to dopamine may be achieved by combining at least 5 mammalian enzymes and 1 bacterial enzyme, which do not naturally occur together and were not evolved to function in the context of this pathway or with plant enzymes. In these instances, it may not be obvious to utilize these enzymes for the biosynthesis of compounds they were not evolved for in nature and that they would function effectively in the context of a heterologous microbial host and this pathway.

[0368] As another example, until recent years the enzyme responsible for the conversion of (S)-reticuline to (R)-reticuline was unknown. Even when a fused epimerase enzyme was discovered, evolutionary analysis suggested that morphine-producing poppies evolved a fusion enzyme between the oxidase and reductase for an epimerase reaction, which was in contrast to non-morphine producing poppies where the epimerase enzymes were non-fused. Based on this analysis, some scholars believed the fusion of the oxidase and reductase portions was necessary to efficiently catalyze the conversion of (S)-reticuline to (R)-reticuline. Novel methods of using engineered split epimerases as discussed herein may perform this epimerization reaction in yeast and in the context of the synthetic BIA pathway, and may perform this epimerization with greater efficiency than performing an epimerization with a wild-type epimerase.

[0369] Examples of the genes that are the object of modifications so as to produce BIAs of interest and/or enzymes of interest are discussed below. Additionally, the genes are discussed in the context of a series of Figures that illustrate pathways that are used in generating BIAs of interest and/or enzymes of interest.

[0370] [TKL1] In some examples, the engineered host cell may modify the expression of the enzyme transketolase. Transketolase is encoded by the TKL1 gene. In some examples, transketolase catalyzes the reaction of fructose-6-phosphate+glyceraldehyde-3-phosphate↔xylulose-5-phosphate+erythrose-4-phosphate, as referenced in FIG. 1. An engineered host cell may be modified to include constitutive overexpression of the TKL1 gene in the engineered host cell. Additionally or alternatively, the engineered host cell may be modified to synthetically regulate the expression of the TKL1 gene in the engineered host cell. In some examples, the engineered host cell may be modified to incorporate a copy, copies, or additional copies, of the TKL1 gene. Additionally or alternatively, the engineered host cell may be modified to incorporate the introduction of a strong promoter element for the overexpression of the TKL1 gene within the engineered host cell. The TKL1 gene may be derived from Saccharomyces cerevisiae or another species.

[0371] [ZWF1] In some examples, the engineered host cell may modify the expression of the enzyme glucose-6-phosphate dehydrogenase. Glucose-6-phosphate dehydrogenase is encoded by the ZWF1 gene. In some examples, glucose-6-phosphate dehydrogenase catalyzes the reaction of glucose-6-phosphate→6-phosphogluconolactone, as referenced in FIG. 1. An engineered host cell may be modified to delete the coding region of the ZWF1 gene in the engineered host cell. Alternatively, the engineered host cell may be modified to disable the functionality of the ZWF1 gene, such as by introducing an inactivating mutation.

[0372] [ARO4] In some examples, the engineered host cell may modify the expression of the enzyme 3-deoxy-D-arabino-heptulosonate-7-phosphate (DAHP) synthase. DAHP synthase is encoded by the ARO4 gene. In some examples, DAHP synthase catalyzes the reaction of erythrose-4-phosphate+phosphoenolpyruvic acid 4 DAHP, as referenced in FIG. 1. An engineered host cell may modify the ARO4 gene to incorporate one or more feedback inhibition alleviating mutations. In particular, a feedback inhibition alleviating mutation (e.g., ARO4^{FBR}) may be incorporated as a directed mutation to a native ARO4 gene at the original locus; as an additional copy introduced as a genetic integration at a separate locus; or as an additional copy on an episomal vector such as a 2-μm or centromeric plasmid. The identifier “FBR” in the mutation ARO4^{FBR} refers to feedback resistant mutants and mutations. The feedback inhibited copy of the DAHP synthase enzyme may be under a native yeast transcriptional regulation, such as when the engineered host cell is a yeast cell. Alternatively, the feedback inhibited copy of the DAHP synthase enzyme may be introduced to the engineered host cell with engineered constitutive or dynamic regulation of protein expression by placing it under the control of a synthetic promoter. In some cases, the ARO4 gene may be derived from Saccharomyces cerevisiae. Examples of modifications to the ARO4 gene include a feedback inhibition resistant mutation, K229L, or Q166K.

[0373] [ARO7] In some examples, the engineered host cell may modify the expression of the enzyme chorismate mutase. Chorismate mutase is encoded by the ARO7 gene. In some examples, chorismate mutase catalyzes the reaction of chorismate→prephenate, as referenced in FIG. 1. An engineered host cell may modify the ARO7 gene to incorporate one or more feedback inhibition alleviating mutations. In particular, a feedback inhibition alleviating mutation (e.g., ARO7^{FBR}) may be incorporated as a directed mutation to a native ARO7 gene at the original locus; as an additional copy introduced as a genetic integration at a separate locus; or as an additional copy on an episomal vector such as a 2-μm or centromeric plasmid. The identifier “FBR” in the mutation ARO7^{FBR} refers to feedback resistant mutants and mutations. The feedback inhibited copy of the chorismate mutase enzyme may be under a native yeast transcriptional regulation, such as when the engineered host cell is a yeast cell. Alternatively, the feedback inhibited copy of the chorismate mutase enzyme may be introduced to the engineered host cell with engineered constitutive or dynamic regulation of protein expression by placing it under the control of a synthetic promoter. In some cases, the ARO7 gene may be derived from Saccharomyces cerevisiae. Examples of modifications to the ARO7 gene include a feedback inhibition resistant mutation or T226I.

[0374] [ARO10] In some examples, the engineered host cell may modify the expression of the enzyme phenylpyruvate decarboxylase. Phenylpyruvate decarboxylase is encoded by the ARO10 gene. In some examples, phenylpyruvate decarboxylase catalyzes the reaction of hydroxyphenylpyruvate→4-hydroxyphenylacetate (4HPAA), as referenced in FIG. 1. An engineered host cell may be modified to include constitutive overexpression of the ARO10 gene in the engineered host cell. Additionally or alternatively, the engineered host cell may be modified to synthetically regulate the expression of the ARO10 gene in the engineered host cell. In some examples, the engineered host cell may be modified to incorporate a copy, copies, or additional copies, of the ARO10 gene. Additionally or alternatively, the engineered host cell may be modified to incorporate the introduction of a strong promoter element for the overexpression of the ARO10 gene within the engineered host cell. The ARO10 gene may be derived from Saccharomyces cerevisiae or another species.

[0375] [ADH2-7, SFA1] In some examples, the engineered host cell may modify the expression of alcohol dehydrogenase enzymes. Alcohol dehydrogenase enzymes may be encoded by one or more of the ADH2, ADH3, ADH4, ADH5, ADH6, ADH7, and SFA1 genes. In some examples, alcohol dehydrogenase catalyzes the reaction of 4HPA→tyrosol. An engineered host cell may be modified to delete the coding region of one or more of the ADH2, ADH3, ADH4, ADH5, ADH6, ADH7, and SFA1 genes in the engineered host cell. Alternatively, the engineered host cell may be modified to disable the functionality of one or more of the ADH2, ADH3, ADH4, ADH5, ADH6, ADH7, and SFA1 genes, such as by introducing an inactivating mutation.

[0376] [ALD2-6] In some examples, the engineered host cell may modify the expression of aldehyde oxidase enzymes. Aldehyde oxidase enzymes may be encoded by one or more of the ALD2, ALD3, ALD4, ALD5, and ALD6 genes. In some examples, aldehyde oxidase catalyzes the reaction of 4HPA→hydroxyphenylacetic acid. An engineered host cell may be modified to delete the coding region of one or more of the ALD2, ALD3, ALD4, ALD5, and ALD6 genes in the engineered host cell. Alternatively, the engineered host cell may be modified to disable the functionality of one or more of the ALD2, ALD3, ALD4, ALD5, and ALD6 genes, such as by introducing an inactivating mutation.

[0377] [AAD4], [AAD6], [AAD10]], [AAD14], [AAD15], [AAD16] In some examples, the engineered host cell may modify the expression of aryl-alcohol dehydrogenase enzymes. Aryl-alcohol dehydrogenase enzymes may be encoded by one or more of AAD4, AAD6, AAD10, AAD14, AAD15, and AAD16 genes. In some examples, aryl-alcohol dehydrogenase catalyzes the reaction of aromatic aldehyde+NAD⁺→aromatic alcohol+NADH.

[0378] [ARI1] In some examples, the engineered host cell may modify the expression of an aldehyde reductase. The aldehyde reductase enzyme may be encoded by the ARI1 gene. In some examples, aldehyde reductase catalyzes the reduction of aromatic aldehyde substrates. In some examples, aldehyde reductase catalyzes the reduction of alophatic aldehyde substrates. In some examples the substrate of the aldehyde reductase ARI1 is 4-hydroxyphenylacetaldehyde (4-HPAA). An engineered host cell may be modified to delete the coding region of ARI. Alternatively, the engineered host cell may be modified to functionally disable ARI1, such as by introducing an inactivating mutation.

[0379] [OPI] In some examples, the engineered host cell may modify the expression of a transcriptional regulator of phospholipid biosynthetic genes. The transcriptional regulator may be encoded by the OPI1 gene. In some examples, the transcriptional regulator represses phospholipid biosynthetic genes. An engineered host cell may be modified to delete the coding region of OPI1. Alternatively, the engineered host cell may be modified to functionally disable OPI1, such as by introducing an inactivating mutation.

[0380] [ARO9] In some examples, the engineered host cell may modify the expression of the enzyme aromatic aminotransferase. Aromatic aminotransferase is encoded by the ARO9 gene. In some examples, aromatic aminotransferase catalyzes the reaction of hydroxyphenylpyruvate+L-alanine tyrosine+pyruvate, as referenced in FIG. 1. An engineered host cell may be modified to include constitutive overexpression of the ARO9 gene in the engineered host cell. Additionally or alternatively, the engineered host cell may be modified to synthetically regulate the expression of the ARO9 gene in the engineered host cell. In some examples, the engineered host cell may be modified to incorporate a copy, copies, or additional copies, of the ARO9 gene. Additionally or alternatively, the engineered host cell may be modified to incorporate the introduction of a strong promoter element for the overexpression of the ARO9 gene within the engineered host cell. The ARO9 gene may be derived from Saccharomyces cerevisiae or another species.

[0381] [ARO8] In some examples, the engineered host cell may modify the expression of the enzyme aromatic aminotransferase. Aromatic aminotransferase is encoded by the ARO8 gene. In some examples, aromatic aminotransferase catalyzes the reaction of hydroxyphenylpyruvate+glutamate↔tyrosine+alpha-ketogluterate, as referenced in FIG. 1. An engineered host cell may be modified to include constitutive overexpression of the ARO8 gene in the engineered host cell. Additionally or alternatively, the engineered host cell may be modified to synthetically regulate the expression of the ARO8 gene in the engineered host cell. In some examples, the engineered host cell may be modified to incorporate a copy, copies, or additional copies, of the ARO8 gene. Additionally or alternatively, the engineered host cell may be modified to incorporate the introduction of a strong promoter element for the overexpression of the ARO8 gene within the engineered host cell. The ARO8 gene may be derived from Saccharomyces cerevisiae or another species.

[0382] [TYR1] In some examples, the engineered host cell may modify the expression of the enzyme prephenate dehydrogenase. Prephenate dehydrogenase is encoded by the TYR1 gene. In some examples, prephenate dehydrogenase catalyzes the reaction of prephenate+NADP⁺→4-hydroxyphenylpyruvate+CO₂+NADPH, as referenced in FIG. 1. An engineered host cell may be modified to include constitutive overexpression of the TYR1 gene in the engineered host cell. Additionally or alternatively, the engineered host cell may be modified to synthetically regulate the expression of the TYR1 gene in the engineered host cell. In some examples, the engineered host cell may be modified to incorporate a copy, copies, or additional copies, of the TYR1 gene. Additionally or alternatively, the engineered host cell may be modified to incorporate the introduction of a strong promoter element for the overexpression of the TYR1 gene within the engineered host cell. The TYR1 gene may be derived from Saccharomyces cerevisiae or another species.

[0383] [TYR] In some examples, the engineered host cell may modify the expression of the enzyme tyrosinase. Tyrosinase is encoded by the TYR gene. In some examples, tyrosinase catalyzes the reaction of tyrosine→L-DOPA, as referenced in FIGS. 1 and 2. In other examples, tyrosinase catalyzes the reaction of L-DOPA→dopaquinone. An engineered host cell may be modified to include constitutive expression of the TYR gene in the engineered host cell. Additionally or alternatively, the engineered host cell may be modified to synthetically regulate the expression of the TYR gene in the engineered host cell. In some examples, the engineered host cell may be modified to incorporate a copy, copies, or additional copies, of the TYR gene. Additionally or alternatively, the engineered host cell may be modified to incorporate the introduction of a strong promoter element for the overexpression of the TYR gene within the engineered host cell. The TYR gene may be derived from Ralstonia solanacearum, Agaricus bisporus, or another species.

[0384] [TyrH] In some examples, the engineered host cell may modify the expression of the enzyme tyrosine hydroxylase. Tyrosine hydroxylase is encoded by the TyrH gene. In some examples, tyrosine hydroxylase catalyzes the reaction of tyrosine→L-DOPA, as referenced in FIGS. 1 and 2. An engineered host cell may be modified to include constitutive expression of the TyrH gene in the engineered host cell. Additionally or alternatively, the engineered host cell may be modified to synthetically regulate the expression of the TyrH gene in the engineered host cell. In some examples, the engineered host cell may be modified to incorporate a copy, copies, or additional copies, of the TyrH gene. Additionally or alternatively, the engineered host cell may be modified to incorporate the introduction of a strong promoter element for the overexpression of the TyrH gene within the engineered host cell. The TyrH gene may be derived from Homo sapiens, Rattus norvegicus, Mus musculus, or another species.

[0385] [DODC] In some examples, the engineered host cell may modify the expression of the enzyme L-DOPA decarboxylase. L-DOPA decarboxylase is encoded by the DODC gene. In some examples, L-DOPA decarboxylase catalyzes the reaction of L-DOPA→dopamine, as referenced in FIG. 1. An engineered host cell may be modified to include constitutive expression of the DODC gene in the engineered host cell. Additionally or alternatively, the engineered host cell may be modified to synthetically regulate the expression of the DODC gene in the engineered host cell. In some examples, the engineered host cell may be modified to incorporate a copy, copies, or additional copies, of the DODC gene. Additionally or alternatively, the engineered host cell may be modified to incorporate the introduction of a strong promoter element for the overexpression of the DODC gene within the engineered host cell. The DODC gene may be derived from Pseudomonas putida, Rattus norvegicus, or another species.

[0386] [TYDC] In some examples, the engineered host cell may modify the expression of the enzyme tyrosine/DOPA decarboxylase. Tyrosine/DOPA decarboxylase is encoded by the TYDC gene. In some examples, tyrosine/DOPA decarboxylase catalyzes the reaction of L-DOPA→dopamine, as referenced in FIG. 3. An engineered host cell may be modified to include constitutive expression of the TYDC gene in the engineered host cell. Additionally or alternatively, the engineered host cell may be modified to synthetically regulate the expression of the TYDC gene in the engineered host cell. In some examples, the engineered host cell may be modified to incorporate a copy, copies, or additional copies, of the TYDC gene. Additionally or alternatively, the engineered host cell may be modified to incorporate the introduction of a strong promoter element for the overexpression of the TYDC gene within the engineered host cell. The TYDC gene may be derived from Papaver somniferum or another species.

[0387] [MAO] In some examples, the engineered host cell may modify the expression of the enzyme monoamine oxidase. Monoamine oxidase is encoded by the MAO gene. In some examples, monoamine oxidase catalyzes the reaction of dopamine→3,4-DHPA, as referenced in FIGS. 1 and 3. An engineered host cell may be modified to include constitutive expression of the MAO gene in the engineered host cell. Additionally or alternatively, the engineered host cell may be modified to synthetically regulate the expression of the MAO gene in the engineered host cell. In some examples, the engineered host cell may be modified to incorporate a copy, copies, or additional copies, of the MAO gene. Additionally or alternatively, the engineered host cell may be modified to incorporate the introduction of a strong promoter element for the overexpression of the MAO gene within the engineered host cell. In some cases, the MAO gene may be codon optimized for expression in Saccharomyces cerevisiae. The MAO gene may be derived from Escherichia coli, Homo sapiens, Micrococcus luteus, or another species.

[0388] [NCS] In some examples, the engineered host cell may modify the expression of the enzyme norcoclaurine synthase. Norcoclaurine synthase is encoded by the NCS gene. In some examples, norcoclaurine synthase catalyzes the reaction of 4HPA+dopamine→(S)-norcoclaurine, as referenced in FIGS. 1 and 3. In particular, FIG. 1 illustrates a biosynthetic scheme for conversion of L-tyrosine to reticuline via norcoclaurine, in accordance with some embodiments of the invention. FIG. 1 provides the use of the enzymes TyrH, tyrosine hydroxylase; DODC, DOPA decarboxylase; NCS, norcoclaurine synthase, as discussed herein; 6OMT, 6-O-methyltransferase; CNMT, coclaurine N-methyltransferase; CYP80B1, cytochrome P450 80B1; CPR, cytochrome P450 NADPH reductase; 4′OMT, 3′hydroxy-N-methylcoclaurine 4′-O-methyltransferase. L-DOPA, L-3,4-dihydroxyphenylalanine; and 4-HPAA, 4-hydroxyphenylacetylaldehyde. Of the enzymes that are illustrated in FIG. 1, 4-HPAA and L-tyrosine are naturally synthesized in yeast. All other listed metabolites are not naturally produced in yeast. Additionally, although TyrH may catalyze the conversion of L-tyrosine to L-DOPA, other enzymes may also be used to perform this step as described in the specification. For example, tyrosinases may also be used to perform the conversion of L-tyrosine to L-DOPA. In addition, other enzymes such as cytochrome P450 oxidases may also be used to perform the conversion of L-tyrosine to L-DOPA. Such enzymes may exhibit oxidase activity on related BIA precursor compounds including L-DOPA and L-tyrosine.

[0389] Additionally, norcoclaurine synthase catalyzes the reaction of 3,4-DHPAA+dopamine→(S)-norlaudanosoline, as referenced in FIGS. 1 and 3. In particular, FIG. 3 illustrates a biosynthetic scheme for conversion of L-tyrosine to reticuline via norlaudanosoline, in accordance with some embodiments of the invention. FIG. 3 provides the use of the enzymes TyrH, tyrosine hydroxylase; DODC, DOPA decarboxylase; maoA, monoamine oxidase; NCS, norcoclaurine synthase; 6OMT, 6-O-methyltransferase; CNMT, coclaurine N-methyltransferase; 4′OMT, 3′hydroxy-N-methylcoclaurine 4′-O-methyltransferase. L-DOPA, L-3,4-dihydroxyphenylalanine; and 3,4-DHPAA, 3,4-dihydroxyphenylacetaldehyde. Of the enzymes that are illustrated in FIG. 3, L-tyrosine is naturally synthesized in yeast.

[0390] An engineered host cell may be modified to include constitutive expression of the NCS gene in the engineered host cell. Additionally or alternatively, the engineered host cell may be modified to synthetically regulate the expression of the NCS gene in the engineered host cell. In some examples, the engineered host cell may be modified to incorporate a copy, copies, or additional copies, of the NCS gene. Additionally or alternatively, the engineered host cell may be modified to incorporate the introduction of a strong promoter element for the overexpression of the NCS gene within the engineered host cell. Additionally, the norcoclaurine synthase may have an N-terminal truncation. In some cases, the NCS gene may be codon optimized for expression in Saccharomyces cerevisiae. The NCS gene may be derived from Coptis japonica, Papaver somniferum, Papver bracteatum, Thalicitum flavum, Corydalis saxicola, or another species.

[0391] [6OMT] In some examples, the engineered host cell may modify the expression of the enzyme norcoclaurine 6-O-methyltransferase. Norcoclaurine 6-O-methyltransferase is encoded by the 6OMT gene. In some examples, norcoclaurine 6-O-methyltransferase catalyzes the reaction of norcoclaurine 4 coclaurine, as referenced in FIG. 1. In other examples, norcoclaurine 6-O-methyltransferase catalyzes the reaction of norlaudanosoline→3′hydroxycoclaurine, as well as other reactions detailed herein, such as those provided in FIG. 3. Additionally, the engineered host cell may be modified to include constitutive expression of the 6OMT gene in the engineered host cell. Additionally or alternatively, the engineered host cell may be modified to synthetically regulate the expression of the 6OMT gene in the engineered host cell. In some examples, the engineered host cell may be modified to incorporate a copy, copies, or additional copies, of the 6OMT gene. Additionally or alternatively, the engineered host cell may be modified to incorporate the introduction of a strong promoter element for the overexpression of the 6OMT gene within the engineered host cell. The 6OMT gene may be derived from P. somniferum, T. flavum, Coptis japonica, or another species.

[0392] [CNMT] In some examples, the engineered host cell may modify the expression of the enzyme coclaurine-N-methyltransferase. Coclaurine-N-methyltransferase is encoded by the CNMT gene. In some examples, coclaurine-N-methyltransferase catalyzes the reaction of coclaurine→N-methylcoclaurine, as referenced in FIG. 1. In other examples, the coclaurine-N-methyltransferase enzyme may catalyze the reaction of 3′hydroxycoclaurine→3′hydroxy-N-methylcoclaurine. In other examples, coclaurine-N-methyltransferase may catalyze other reactions detailed herein, such as those provided in FIG. 3. Additionally, the engineered host cell may be modified to include constitutive expression of the CNMT gene in the engineered host cell. Additionally or alternatively, the engineered host cell may be modified to synthetically regulate the expression of the CNMT gene in the engineered host cell. In some examples, the engineered host cell may be modified to incorporate a copy, copies, or additional copies, of the CNMT gene. Additionally or alternatively, the engineered host cell may be modified to incorporate the introduction of a strong promoter element for the overexpression of the CNMT gene within the engineered host cell. The CNMT gene may be derived from P. somniferum, T. flavum, Coptis japonica, or another species.

[0393] [4′OMT] In some examples, the engineered host cell may modify the expression of the enzyme 4′-O-methyltransferase. 4′-O-methyltransferase is encoded by the 4′OMT gene. In some examples, 4′-O-methyltransferase catalyzes the reaction of 3′-hydroxy-N-methylcoclaurine→reticulin, as referenced in FIG. 1. In other examples, 4′-O-methyltransferase catalyzes other reactions detailed herein, such as those provided in FIG. 3. Additionally, the engineered host cell may be modified to include constitutive expression of the 4′OMT gene in the engineered host cell. Additionally or alternatively, the engineered host cell may be modified to synthetically regulate the expression of the 4′OMT gene in the engineered host cell. In some examples, the engineered host cell may be modified to incorporate a copy, copies, or additional copies, of the 4′OMT gene. Additionally or alternatively, the engineered host cell may be modified to incorporate the introduction of a strong promoter element for the overexpression of the 4′OMT gene within the engineered host cell. The 4′OMT gene may be derived from P. somniferum, T. flavum, Coptis japonica, or another species.

[0394] [CYP80B1] In some examples, the engineered host cell may modify the expression of the enzyme cytochrome P450 80B1. Cytochrome P450 80B1 is encoded by the CYP80B1 gene. In some examples, cytochrome P450 80B1 catalyzes the reaction of N-methylcoclaurine→3′-hydroxy-N-methylcoclaurine, as referenced in FIG. 1. An engineered host cell may be modified to include constitutive expression of the cytochrome P450 80B1 gene in the engineered host cell. Additionally or alternatively, the engineered host cell may be modified to synthetically regulate the expression of the cytochrome P450 80B1 gene in the engineered host cell. In some examples, the engineered host cell may be modified to incorporate a copy, copies, or additional copies, of the cytochrome P450 80B1 gene. Additionally or alternatively, the engineered host cell may be modified to incorporate the introduction of a strong promoter element for the overexpression of the cytochrome P450 80B1 gene within the engineered host cell. In some cases, the CYP80B1 gene may be codon optimized for expression in Saccharomyces cerevisiae. The cytochrome P450 80B1 gene may be derived from P. somniferum, E. californica, T. flavum, or another species.

[0395] [FOL2] In some examples, the engineered host cell may modify the expression of the enzyme GTP cyclohydrolase. GTP cyclohydrolase is encoded by the FOL2 gene. In some examples, GTP cyclohydrolase catalyzes the reaction of GTP→dihydroneopterin triphosphate, as referenced in FIG. 2. The engineered host cell may be modified to include constitutive overexpression of the FOL2 gene in the engineered host cell. The engineered host cell may also be modified to include native regulation. Additionally or alternatively, the engineered host cell may be modified to synthetically regulate the expression of the FOL2 gene in the engineered host cell. In some examples, the engineered host cell may be modified to incorporate a copy, copies, or additional copies, of the FOL2 gene. Additionally or alternatively, the engineered host cell may be modified to incorporate the introduction of a strong promoter element for the overexpression of the FOL2 gene within the engineered host cell. The FOL2 gene may be derived from Saccharomyces cerevisiae, Homo sapiens, Mus musculus, or another species.

[0396] [PTPS] In some examples, the engineered host cell may modify the expression of the enzyme 6-pyruvoyl tetrahydrobiopterin (PTP) synthase. Pyruvoyl tetrahydrobiopterin synthase is encoded by the PTPS gene. In some examples, 6-pyruvoyl tetrahydrobiopterin synthase catalyzes the reaction of dihydroneopterin triphosphate→PTP, as referenced in FIG. 2. The engineered host cell may be modified to include constitutive expression of the PTPS gene in the engineered host cell. Additionally or alternatively, the engineered host cell may be modified to synthetically regulate the expression of the PTPS gene in the engineered host cell. In some examples, the engineered host cell may be modified to incorporate a copy, copies, or additional copies, of the PTPS gene. Additionally or alternatively, the engineered host cell may be modified to incorporate the introduction of a strong promoter element for the overexpression of the PTPS gene within the engineered host cell. In some cases, the PTPS gene may be codon optimized for expression in Saccharomyces cerevisiae. The PTPS gene may be derived from Rattus norvegicus, Homo sapiens, Mus musculus, or another species.

[0397] [SepR] In some examples, the engineered host cell may modify the expression of the enzyme sepiapterin reductase. Sepiapterin reductase is encoded by the SepR gene. In some examples, sepiapterin reductase catalyzes the reaction of PTP→BH₄, as referenced in FIG. 2. The engineered host cell may be modified to include constitutive expression of the SepR gene in the engineered host cell. Additionally or alternatively, the engineered host cell may be modified to synthetically regulate the expression of the SepR gene in the engineered host cell. In some examples, the engineered host cell may be modified to incorporate a copy, copies, or additional copies, of the SepR gene. Additionally or alternatively, the engineered host cell may be modified to incorporate the introduction of a strong promoter element for the overexpression of the SepR gene within the engineered host cell. In some cases, the SepR gene may be codon optimized for expression in Saccharomyces cerevisiae. The SepR gene may be derived from Rattus norvegicus, Homo sapiens, Mus musculus, or another species.

[0398] [PCD] In some examples, the engineered host cell may modify the expression of the enzyme 4a-hydroxytetrahydrobiopterin (pterin-4α-carbinolamine) dehydratase. 4a-hydroxytetrahydrobiopterin dehydratase is encoded by the PCD gene. In some examples, 4a-hydroxytetrahydrobiopterin dehydratase catalyzes the reaction of 4a-hydroxytetrahydrobiopterin→H₂O+quinonoid dihydropteridine, as referenced in FIG. 2. The engineered host cell may be modified to include constitutive expression of the PCD gene in the engineered host cell. Additionally or alternatively, the engineered host cell may be modified to synthetically regulate the expression of the PCD gene in the engineered host cell. In some examples, the engineered host cell may be modified to incorporate a copy, copies, or additional copies, of the PCD gene. Additionally or alternatively, the engineered host cell may be modified to incorporate the introduction of a strong promoter element for the overexpression of the PCD gene within the engineered host cell. In some cases, the PCD gene may be codon optimized for expression in Saccharomyces cerevisiae. The PCD gene may be derived from Rattus norvegicus, Homo sapiens, Mus musculus, or another species.

[0399] [QDHPR] In some examples, the engineered host cell may modify the expression of the enzyme quinonoid dihydropteridine reductase. Quinonoid dihydropteridine reductase is encoded by the QDHPR gene. In some examples, quinonoid dihydropteridine reductase catalyzes the reaction of quinonoid dihydropteridine→BH₄, as referenced in FIG. 2. The engineered host cell may be modified to include constitutive expression of the QDHPR gene in the engineered host cell. Additionally or alternatively, the engineered host cell may be modified to synthetically regulate the expression of the QDHPR gene in the engineered host cell. In some examples, the engineered host cell may be modified to incorporate a copy, copies, or additional copies, of the QDHPR gene. Additionally or alternatively, the engineered host cell may be modified to incorporate the introduction of a strong promoter element for the overexpression of the QDHPR gene within the engineered host cell. In some cases, the QDHPR gene may be codon optimized for expression in Saccharomyces cerevisiae. The QDHPR gene may be derived from Rattus norvegicus, Homo sapiens, Mus musculus, or another species.

[0400] [DHFR] In some examples, the engineered host cell may modify the expression of the enzyme dihydrofolate reductase. Dihydrofolate reductase is encoded by the DHFR gene. In some examples, dihydrofolate reductase catalyzes the reaction of 7,8-dihydrobiopterin (BH₂)→5,6,7,8-tetrahydrobiopterin (BH₄), as referenced in FIG. 2. This reaction may be useful in recovering BH₄ as a co-substrate for the converstion of tyrosine to L-DOPA, as illustrated in FIG. 2. The engineered host cell may be modified to include constitutive expression of the DHFR gene in the engineered host cell. Additionally or alternatively, the engineered host cell may be modified to synthetically regulate the expression of the DHFR gene in the engineered host cell. In some examples, the engineered host cell may be modified to incorporate a copy, copies, or additional copies, of the DHFR gene. Additionally or alternatively, the engineered host cell may be modified to incorporate the introduction of a strong promoter element for the overexpression of the DHFR gene within the engineered host cell. In some cases, the DHFR gene may be codon optimized for expression in Saccharomyces cerevisiae. The DHFR gene may be derived from Rattus norvegicus, Homo sapiens, or another species.

[0401] [DRS-DRR] As discussed above with regard to epimerizing 1-BIAs, the engineered host cell may modify the expression of a BIA epimerase. The BIA epimerase is encoded by the DRS-DRR gene. In some examples, DRS-DRR may also be referred to as CYP-COR. In some examples, an engineered split version, or an engineered fused version, of a BIA epimerase catalyzes the conversion of (S)-1-BIA→(R)-1-BIA, as referenced in FIG. 4. In particular, FIG. 4 illustrates a biosynthetic scheme for conversion of L-tyrosine to morphinan alkaloids, in accordance with some embodiments of the invention. FIG. 4 provides the use of the enzymes CPR, cytochrome P450 reductase; DRS-DRR, dehydroreticuline synthase and dehydroreticuline reductase; SalSyn, salutaridine synthase; SalR, salutaridine reductase; SalAT, salutaridinol 7-O-acetyltransferase; T6ODM, thebaine 6-O-demethylase; COR, codeinone reductase; and CODM, codeine-O-demethylase.

[0402] The engineered host cell may be modified to include constitutive expression of the engineered DRS-DRR gene in the engineered host cell. In some cases, the engineered DRS-DRR gene may encode an engineered fusion epimerase. In some cases, the engineered DRS-DRR gene may encode an engineered split epimerase. Additionally or alternatively, the engineered host cell may be modified to synthetically regulate the expression of the DRS-DRR gene in the engineered host cell. In some examples, the engineered host cell may be modified to incorporate a copy, copies, or additional copies, of the DRS-DRR gene. Additionally or alternatively, the engineered host cell may be modified to incorporate the introduction of a strong promoter element for the overexpression of the DRS-DRR gene within the engineered host cell. The DRS-DRR gene may be derived from Papaver bracteatum, Papaver somniferum, Papaver setigerum, Chelidonium majus, or another species.

[0403] [CPR] In some examples, the engineered host cell may modify the expression of the enzyme cytochrome P450 reductase. The cytochrome P450 reductase is encoded by the CPR gene. In some examples, the cytochrome P450 reductase catalyzes the reaction of (R)-reticuline→salutaridine, as referenced in FIG. 4. Additionally, the cytochrome P450 reductase catalyzes other reactions such as those described in FIGS. throughout the application. The engineered host cell may be modified to include constitutive expression of the CPR gene in the engineered host cell. Additionally or alternatively, the engineered host cell may be modified to synthetically regulate the expression of the CPR gene in the engineered host cell. In some examples, the engineered host cell may be modified to incorporate a copy, copies, or additional copies, of the CPR gene. Additionally or alternatively, the engineered host cell may be modified to incorporate the introduction of a strong promoter element for the overexpression of the CPR gene within the engineered host cell. The CPR gene may be derived from E. californica, P. somniferum, H. sapiens, S. cerevisiae, A. thaliana, or another species.

[0404] [SalSyn] In some examples, the engineered host cell may modify the expression of the enzyme salutaridine synthase. The salutaridine synthase is encoded by the SalSyn gene. In some examples, the salutaridine synthase catalyzes the reaction of (R)-reticuline→salutaridine, as referenced in FIG. 4. The engineered host cell may be modified to include constitutive expression of the SalSyn gene in the engineered host cell. Additionally or alternatively, the engineered host cell may be modified to synthetically regulate the expression of the SalSyn gene in the engineered host cell. In some examples, the engineered host cell may be modified to incorporate a copy, copies, or additional copies, of the SalSyn gene. Additionally or alternatively, the engineered host cell may be modified to incorporate the introduction of a strong promoter element for the overexpression of the SalSyn gene within the engineered host cell. In some cases, the SalSyn gene may be codon optimized for expression in Saccharomyces cerevisiae. In some examples the SalSyn may be modified at the N-terminus. The SalSyn gene may be derived from Papaver somniferum, Papaver spp, Chelidonium majus, or another species.

[0405] [SalR] In some examples, the engineered host cell may modify the expression of the enzyme salutaridine reductase. Salutaridine reductase is encoded by the SalR gene. In some examples, salutaridine reductase reversibly catalyzes the reaction of salutaridinol→salutaridine, as referenced in FIG. 4. The engineered host cell may be modified to include constitutive expression of the SalR gene in the engineered host cell. Additionally or alternatively, the engineered host cell may be modified to synthetically regulate the expression of the SalR gene in the engineered host cell. In some examples, the engineered host cell may be modified to incorporate a copy, copies, or additional copies, of the SalR gene. Additionally or alternatively, the engineered host cell may be modified to incorporate the introduction of a strong promoter element for the overexpression of the SalR gene within the engineered host cell. In some cases, the SalR gene may be codon optimized for expression in Saccharomyces cerevisiae. The SalR gene may be derived from Papaver somniferum, Papaver bracteatum, Papaver spp., Chelidonium majus, or another species.

[0406] [SalAT] In some examples, the engineered host cell may modify the expression of the enzyme acetyl-CoA: salutaridinol 7-O-acetyltransferase. Acetyl-CoA: salutaridinol 7-O-acetyltransferase is encoded by the SalAT gene. In some examples, acetyl-CoA:salutaridinol 7-O-acetyltransferase catalyzes the reaction of acetyl-CoA+salutaridinol→CoA+7-O-acetylsalutaridinol, as referenced in FIG. 4. The engineered host cell may be modified to include constitutive expression of the SalAT gene in the engineered host cell. Additionally or alternatively, the engineered host cell may be modified to synthetically regulate the expression of the SalAT gene in the engineered host cell. In some examples, the engineered host cell may be modified to incorporate a copy, copies, or additional copies, of the SalAT gene. Additionally or alternatively, the engineered host cell may be modified to incorporate the introduction of a strong promoter element for the overexpression of the SalAT gene within the engineered host cell. In some cases, the SalAT gene may be codon optimized for expression in Saccharomyces cerevisiae. The SalAT gene may be derived from Papaver somniferum, Papaver bracteatum, Papaver orientate, Papaver spp., or another species.

[0407] [TS] In some examples, the engineered host cell may modify the expression of the enzyme thebaine synthase. Thebaine synthase is encoded by the TS gene. In some examples, a thebaine synthase or an engineered thebaine synthase catalyzes the reaction of 7-O-acetylsalutaridinol→thebaine+acetate, as referenced in FIG. 4. In some examples, the reaction of 7-O-acetylsalutaridinol→thebaine+acetate occurs spontaneously, but thebaine synthase catalyzes some portion of this reaction. In particular, FIG. 4 illustrates a biosynthetic scheme for conversion of L-tyrosine to morphinan alkaloids, in accordance with some embodiments of the invention. FIG. 4 provides the use of the enzymes CPR, cytochrome P450 reductase; DRS-DRR, dehydroreticuline synthase and dehydroreticuline reductase; SalSyn, salutaridine synthase; SalR, salutaridine reductase; SalAT, salutaridinol 7-O-acetyltransferase; TS, thebaine synthase; T6ODM, thebaine 6-O-demethylase; COR, codeinone reductase; and CODM, codeine-O-demethylase.

[0408] The engineered host cell may be modified to include constitutive expression of the TS gene or the engineered TS gene in the engineered host cell. In some cases, the engineered TS gene may encode an engineered fusion enzyme. Additionally or alternatively, the engineered host cell may be modified to synthetically regulate the expression of the TS gene in the engineered host cell. In some examples, the engineered host cell may be modified to incorporate a copy, copies, or additional copies, of the TS gene. Additionally or alternatively, the engineered host cell may be modified to incorporate the introduction of a strong promoter element for the overexpression of the TS gene within the engineered host cell. In some cases, the TS gene may be codon optimized for expression in Saccharomyces cerevisiae. The TS gene may be derived from Papaver somniferum, Papaver bracteatum, Papaver orientate, Papaver spp., or another species.

[0409] [T6ODM] In some examples, the engineered host cell may modify the expression of the enzyme thebaine 6-O-demethylase. Thebaine 6-O demethylase is encoded by the T6ODM gene. In some examples, thebaine 6-O-demethylase catalyzes the reaction of thebaine→neopinone, as referenced in FIG. 4. Once the neopinone has been produced, the neopinone may be converted to codeinone. The conversion of neopinone 4 codeinone may occur spontaneously. Alternatively, the conversion of neopinone 4 codeinone may occur as a result of a catalyzed reaction. In other examples, the T6ODM enzyme may catalyze the O-demethylation of substrates other than thebaine. For example, T6ODM may O-demethylate oripavine to produce morphinone. Alternatively, T6ODM may catalyze the O-demethylation of BIAs within the 1-benzylisoquinoline, protoberberine, or protopine classes such as papaverine, canadine, and allocryptopine, respectively. The engineered host cell may be modified to include constitutive expression of the T6ODM gene in the engineered host cell. Additionally or alternatively, the engineered host cell may be modified to synthetically regulate the expression of the T6ODM gene in the engineered host cell. In some examples, the engineered host cell may be modified to incorporate a copy, copies, or additional copies, of the T6ODM gene. Additionally or alternatively, the engineered host cell may be modified to incorporate the introduction of a strong promoter element for the overexpression of the T6ODM gene within the engineered host cell. In some cases, the T6ODM gene may be codon optimized for expression in Saccharomyces cerevisiae. The T6ODM gene may be derived from Papaver somniferum, or another species.

[0410] [NPI] In some examples, the engineered host cell may modify the expression of the enzyme neopinone isomerase. Neopinone isomerase is encoded by the NPI gene. In some examples, a neopinone isomerase or an engineered neopinone isomerase catalyzes the reaction of neopinone 4 codeinone, as referenced in FIG. 4. In some examples, the reaction of neopinone 4 codeinone occurs spontaneously, but neopinone isomerase catalyzes some portion of this reaction. In particular, FIG. 4 illustrates a biosynthetic scheme for conversion of L-tyrosine to morphinan alkaloids, in accordance with some embodiments of the invention. FIG. 4 provides the use of the enzymes CPR, cytochrome P450 reductase; DRS-DRR, dehydroreticuline synthase and dehydroreticuline reductase; SalSyn, salutaridine synthase; SalR, salutaridine reductase; SalAT, salutaridinol 7-O-acetyltransferase; TS, thebaine synthase; T6ODM, thebaine 6-O-demethylase; NPI, neopinone isomerase; COR, codeinone reductase; and CODM, codeine-O-demethylase.

[0411] The engineered host cell may be modified to include constitutive expression of the NPI gene or the engineered NPI gene in the engineered host cell. In some cases, the engineered NPI gene may encode an engineered fusion enzyme. Additionally or alternatively, the engineered host cell may be modified to synthetically regulate the expression of the NPI gene in the engineered host cell. In some examples, the engineered host cell may be modified to incorporate a copy, copies, or additional copies, of the NPI gene. Additionally or alternatively, the engineered host cell may be modified to incorporate the introduction of a strong promoter element for the overexpression of the NPI gene within the engineered host cell. In some cases, the NPI gene may be codon optimized for expression in Saccharomyces cerevisiae. The NPI gene may be derived from Papaver somniferum, Papaver bracteatum, Papaver orientate, Papaver spp., or another species.

[0412] [COR] In some examples, the engineered host cell may modify the expression of the enzyme codeinone reductase. Codeinone reductase is encoded by the COR gene. In some examples, codeinone reductase catalyzes the reaction of codeinone to codeine, as referenced in FIG. 4. In some cases, codeinone reductase can catalyze the reaction of neopinone to neopine. In other examples, COR can catalyze the reduction of other morphinans including hydrocodone→dihydrocodeine, 14-hydroxycodeinone→14-hydroxycodeine, and hydromorphone→dihydromorphine. The engineered host cell may be modified to include constitutive expression of the COR gene in the engineered host cell. Additionally or alternatively, the engineered host cell may be modified to synthetically regulate the expression of the COR gene in the engineered host cell. In some examples, the engineered host cell may be modified to incorporate a copy, copies, or additional copies, of the COR gene. Additionally or alternatively, the engineered host cell may be modified to incorporate the introduction of a strong promoter element for the overexpression of the COR gene within the engineered host cell. In some cases, the COR gene may be codon optimized for expression in Saccharomyces cerevisiae. Additionally or alternatively, the COR gene may be modified with the addition of targeting sequences for mitochondria, vacuole, endoplasmic reticulum, or a combination thereof. The COR gene may be derived from Papaver somniferum, or another species.

[0413] [CODM] In some examples, the engineered host cell may modify the expression of the enzyme codeine O-demethylase. Codeine O-demethylase is encoded by the CODM gene. In some examples, codeine O-demethylase catalyzes the reaction of codeine to morphine, as referenced in FIG. 4. Codeine O-demethylase can also catalyze the reaction of neopine to neomorphine. Codeine O-demethylase can also catalyze the reaction of thebaine to oripavine. In other examples, CODM may catalyze the O-demethylation of BIAs within the 1-benzylisoquinoline, aporphine, and protoberberine classes such as reticuline, isocorydine, and scoulerine, respectively. In other examples, the CODM enzyme may catalyze an O,O-demethylenation reaction to cleave the methylenedioxy bridge structures in protopines. The engineered host cell may be modified to include constitutive expression of the CODM gene in the engineered host cell. Additionally or alternatively, the engineered host cell may be modified to synthetically regulate the expression of the CODM gene in the engineered host cell. In some examples, the engineered host cell may be modified to incorporate a copy, copies, or additional copies, of the CODM gene. Additionally or alternatively, the engineered host cell may be modified to incorporate the introduction of a strong promoter element for the overexpression of the CODM gene within the engineered host cell. In some cases, the CODM gene may be codon optimized for expression in Saccharomyces cerevisiae. Additionally or alternatively, the CODM gene may be modified with the addition of targeting sequences for mitochondria. The CODM gene may be derived from Papaver somniferum, Papaver spp., or another species.

[0414] [BBE] In some examples, the engineered host cell may modify the expression of the enzyme berberine bridge enzyme. The berberine bridge enzyme is encoded by the BBE gene. In some examples, berberine bridge enzyme catalyzes the reaction of (S)-reticuline→(S)-scoulerine, as referenced in FIG. 9. FIG. 9 illustrates a biosynthetic scheme for conversion of L-tyrosine to protoberberine alkaloids, in accordance with some embodiments of the invention. In particular, FIG. 9 provides the use of the enzymes BBE, berberine bridge enzyme; S9OMT, scoulerine 9-O-methyltransferase; CAS, canadine synthase; CPR, cytochrome P450 reductase; and STOX, tetrahydroprotoberberine oxidase. The engineered host cell may be modified to include constitutive expression of the BBE gene in the engineered host cell. Additionally or alternatively, the engineered host cell may be modified to synthetically regulate the expression of the BBE gene in the engineered host cell. In some examples, the engineered host cell may be modified to incorporate a copy, copies, or additional copies, of the BBE gene. Additionally or alternatively, the engineered host cell may be modified to incorporate the introduction of a strong promoter element for the overexpression of the BBE gene within the engineered host cell. The BBE gene may be derived from Papaver somniferum, Argemone mexicana, Eschscholzia californica, Berberis stolonifera, Thalictrum flavum subsp. glaucum, Coptis japonica, Papaver spp., or another species.

[0415] [CYP2D6] In some examples, the engineered host cell may modify the expression of cytochrome P450, family 2, subfamily D, polypeptide 6. This particular cytochrome P450 is encoded by the CYP2D6 gene. This particular cytochrome P450 enzyme may be characterized as a promiscuous oxidase. In some examples, this particular cytochrome P450 enzyme may catalyze the reaction of (R)-reticuline+NADPH+H⁺+O₂→salutaridine+NADP⁺+2 H₂O, among other reactions.

[0416] [S9OMT] In some examples, the engineered host cell may modify the expression of the enzyme S-adenosyl-L-methionine: (S)-scoulerine 9-O-methyltransferase. S-adenosyl-L-methionine: (S)-scoulerine 9-O-methyltransferase is encoded by the S9OMT gene. In some examples, S-adenosyl-L-methionine: (S)-scoulerine 9-O-methyltransferase catalyzes the reaction of S-adenosyl-L-methionine+(S)-scoulerine→S-adenosyl-L-homocysteine+(S)-tetrahydrocolumbamine, as referenced in FIG. 9. The engineered host cell may be modified to include constitutive expression of the S9OMT gene in the engineered host cell. Additionally or alternatively, the engineered host cell may be modified to synthetically regulate the expression of the S9OMT gene in the engineered host cell. In some examples, the engineered host cell may be modified to incorporate a copy, copies, or additional copies, of the S9OMT gene. Additionally or alternatively, the engineered host cell may be modified to incorporate the introduction of a strong promoter element for the overexpression of the S9OMT gene within the engineered host cell. In some cases, the S9OMT gene may be codon optimized for expression in Saccharomyces cerevisiae. The S9OMT gene may be derived from Thalictrum flavum subsp. glaucum, Coptis japonica, Coptis chinensis, Papaver somniferum, Thalictrum spp., Coptis spp., Papaver spp., or another species. In some examples, the S9OMT gene may be 100% similar to the naturally occurring gene.

[0417] [CAS] In some examples, the engineered host cell may modify the expression of the enzyme (S)-canadine synthase. (S)-canadine synthase is encoded by the CAS gene. In some examples, (S)-canadine synthase catalyzes the reaction of (S)-tetrahydrocolumbamine→(S)-canadine, as referenced in FIG. 9. The engineered host cell may be modified to express the CAS gene in the engineered host cell. The engineered host cell may be modified to include constitutive expression of the CAS gene in the engineered host cell. Additionally or alternatively, the engineered host cell may be modified to synthetically regulate the expression of the CAS gene in the engineered host cell. In some examples, the engineered host cell may be modified to incorporate a copy, copies, or additional copies, of the CAS gene. Additionally or alternatively, the engineered host cell may be modified to incorporate the introduction of a strong promoter element for the overexpression of the CAS gene within the engineered host cell. The CAS gene may be derived from Thalictrum flavum subsp. glaucum, Coptis japonica, Thalictrum spp., Coptis spp., or another species.

[0418] [STOX] In some examples, the engineered host cell may modify the expression of the enzyme (S)-tetrahydroprotoberberine oxidase. (S)-tetrahydroprotoberberine oxidase is encoded by the STOX gene. In some examples, (S)-tetrahydroprotoberberine oxidase catalyzes the reaction of (S)-tetrahydroberberine+2 O₂→berberine+2 H₂O₂, as referenced in FIG. 9. The engineered host cell may be modified to include constitutive expression of the STOX gene in the engineered host cell. Additionally or alternatively, the engineered host cell may be modified to synthetically regulate the expression of the STOX gene in the engineered host cell. In some examples, the engineered host cell may be modified to incorporate a copy, copies, or additional copies, of the STOX gene. Additionally or alternatively, the engineered host cell may be modified to incorporate the introduction of a strong promoter element for the overexpression of the STOX gene within the engineered host cell. In some examples the STOX may be modified at the N-terminus. In some cases, the STOX gene may be codon optimized for expression in Saccharomyces cerevisiae. The STOX gene may be derived from Berberis wilsonae, Coptis japonica, Berberis spp., Coptis spp., or another species.

[0419] [TNMT] In some examples, the engineered host cell may modify the expression of the enzyme tetrahydroprotoberberine-N-methyltransferase. Tetrahydroprotoberberine-N-methyltransferase is encoded by the TNMT gene. In some examples, tetrahydroprotoberberine-N-methyltransferase catalyzes the reaction of canadine→N-methylcanadine, as referenced in FIG. 7. FIG. 7 illustrates a biosynthetic scheme for conversion of L-tyrosine to noscapine, noscapinoid, and phthalideisoquinoline, in accordance with some embodiments of the invention. In particular, FIG. 7 provides the use of the enzymes BBE, berberine bridge enzyme; S9OMT, scoulerine 9-O-methyltransferase; CAS, canadine synthase; CPR, cytochrome P450 reductase; TNMT, tetrahydroprotoberberine cis-N-methyltransferase; CYP82Y1, N-methylcanadine 1-hydroxylase; CYP82X2, 1-hydroxy-N-methylcanadine 13-hydroxylase; AT1, 1,13-dihydroxy-N-methylcandine 13-O-acetyltransferase; CYP82X1, 4′-O-desmethyl-3-O-acetylpapaveroxine synthase; CXE1, narcotine hemiacetal synthase; NOS (or SDR1), noscapine synthase; MT2, narcotoline-4′-O-methyltrasnferase 1; MT3, narcotoline-4′-O-methyltransferase 2; and 6OMT, 6-O-methyltransferase.

[0420] In other examples, tetrahydroprotoberberine-N-methyltransferase catalyzes the reaction of stylopine→cis-N-methylstylopine, as referenced in FIG. 8. FIG. 8 illustrates a biosynthetic scheme for conversion of L-tyrosine to sanguinarine and benzophenanthridine alkaloids, in accordance with some embodiments of the invention. In particular, FIG. 8 provides the use of the enzymes BBE, berberine bridge enzyme; CFS, cheilanthifoline synthase; STS, stylopine synthase; TNMT, tetrahydroberberine N-methyltransferase; MSH, cis-N-methylstylopine 14-hydroxylase; P6H, protopine 6-hydroxylase; and DBOX, dihydrobenzophenanthride oxidase. The engineered host cell may be modified to include constitutive expression of the TNMT gene in the engineered host cell. Additionally or alternatively, the engineered host cell may be modified to synthetically regulate the expression of the TNMT gene in the engineered host cell. In some examples, the engineered host cell may be modified to incorporate a copy, copies, or additional copies, of the TNMT gene. Additionally or alternatively, the engineered host cell may be modified to incorporate the introduction of a strong promoter element for the overexpression of the TNMT gene within the engineered host cell. In some cases, the TNMT gene may be codon optimized for expression in Saccharomyces cerevisiae. The TNMT gene may be derived from Papaver somniferum, Eschscholzia californica, Papaver bracteatum, Argemone mexicana, or another species.

[0421] [CYP82Y1] In some examples, the engineered host cell may modify the expression of the enzyme N-methylcanadine 1-hydroxylase. N-methylcanadine 1-hydroxylase is encoded by the CYP82Y1 gene. In some examples, N-methylcanadine 1-hydroxylase catalyzes the reaction of N-methylcanadine→1-hydroxy-N-methylcanadine, as referenced in FIG. 7. The engineered host cell may be modified to include constitutive expression of the CYP82Y1 gene in the engineered host cell. Additionally or alternatively, the engineered host cell may be modified to synthetically regulate the expression of the CYP82Y1 gene in the engineered host cell. In some examples, the engineered host cell may be modified to incorporate a copy, copies, or additional copies, of the CYP82Y1 gene. Additionally or alternatively, the engineered host cell may be modified to incorporate the introduction of a strong promoter element for the overexpression of the CYP82Y1 gene within the engineered host cell. In some cases, the CYP82Y1 gene may be codon optimized for expression in Saccharomyces cerevisiae. In some examples the CYP82Y1 may be modified at the N-terminus. The CYP82Y1 gene may be derived from Papaver somniferum, Papaver spp., Plantago arenaria, Rauwolfia heterophylla, Adlumia fungosa, Hydrastis canadensis, Stylomecon heterophylla, Hypecoum, or another species.

[0422] [CYP82X2] In some examples, the engineered host cell may modify the expression of the enzyme 1-hydroxy-N-methylcanadine 13-hydroxylase. 1-hydroxy-N-methylcanadine 13-hydroxylase is encoded by the CYP82X2 gene. In some examples, 1-hydroxy-N-methylcanadine 13-hydroxylase catalyzes the reaction of 1-hydroxy-N-methylcanadine→1-hydroxy-N-methylophiocarpine (i.e. 1,13-dihydroxy-N-methylcanadine), as referenced in FIG. 7. The engineered host cell may be modified to include constitutive expression of the CYP82X2 gene in the engineered host cell. Additionally or alternatively, the engineered host cell may be modified to synthetically regulate the expression of the CYP82X2 gene in the engineered host cell. In some examples, the engineered host cell may be modified to incorporate a copy, copies, or additional copies, of the CYP82X2 gene. Additionally or alternatively, the engineered host cell may be modified to incorporate the introduction of a strong promoter element for the overexpression of the CYP82X2 gene within the engineered host cell. In some cases, the CYP82X2 gene may be codon optimized for expression in Saccharomyces cerevisiae. In some examples the CYP82X2 may be modified at the N-terminus. The CYP82X2 gene may be derived from P. somniferum, Papaver spp, Plantago arenaria, Rauwolfia heterophylla, Adlumia fungosa, Hydrastis Canadensis, Stylomecon heterophylla, Dactylicapnos torulosa, Glaucium flavum, Berberis laurina, B. Vulgaris, Corydalis spp, Fumaria spp, Dactylicapnos spp., or another species. In some examples, the CYP82X2 gene may undergo N-terminus engineering. In some examples, N-terminus engineering may include N-terminal truncation.

[0423] [CYP82X1] In some examples, the engineered host cell may modify the expression of the enzyme 4′-O-desmethyl-3-O-acetylpapaveroxine synthase. 4′-O-desmethyl-3-O-acetylpapaveroxine synthase is encoded by the CYP82X1 gene. In some examples, 4′-O-desmethyl-3-O-acetylpapaveroxine synthase catalyzes the reaction of 1-hydroxy-13-O-acetyl-N-methylcanadine→4′-O-desmethyl-3-O-acetylpapaveroxine, as referenced in FIG. 7. Additionally, CYP82X1 catalyzes the reaction of 1-hydroxy-N-methylcanadine→4′-O-desmethylmacrantaldehyde. The engineered host cell may be modified to include constitutive expression of the CYP82X1 gene in the engineered host cell. Additionally or alternatively, the engineered host cell may be modified to synthetically regulate the expression of the CYP82X1 gene in the engineered host cell. In some examples, the engineered host cell may be modified to incorporate a copy, copies, or additional copies, of the CYP82X1 gene. Additionally or alternatively, the engineered host cell may be modified to incorporate the introduction of a strong promoter element for the overexpression of the CYP82X1 gene within the engineered host cell. In some cases, the CYP82X1 gene may be codon optimized for expression in Saccharomyces cerevisiae. In some examples the CYP82X1 may be modified at the N-terminus. The CYP82X1 gene may be derived from Papaver somniferum, Papaver spp., Plantago arenaria, Rauwolfia heterophylla, Adlumia fungosa, Hydrastis canadensis, Stylomecon heterophylla, Hypecoum, or another species. In other examples, the CYP82X1 gene may undergo N-terminus engineering. In some examples, N-terminus engineering may include N-terminal truncation.

[0424] [CFS] In some examples, the engineered host cell may modify the expression of the enzyme cheilanthifoline synthase. Cheilanthifoline synthase is encoded by the CFS gene. In some examples, cheilanthifoline synthase catalyzes the reaction of scoulerine→cheilanthifoline, as referenced in FIG. 8. An engineered host cell may be modified to include constitutive expression of the CFS gene in the engineered host cell. Additionally or alternatively, the engineered host cell may be modified to synthetically regulate the expression of the CFS gene in the engineered host cell. In some examples, the engineered host cell may be modified to incorporate a copy, copies, or additional copies, of the CFS gene. Additionally or alternatively, the engineered host cell may be modified to incorporate the introduction of a strong promotor element for the overexpression of the CFS gene within the engineered host cell. The CFS gene may be derived from P. somniferum, E. californica, A. mexicana, or another species.

[0425] [STS] In some examples, the engineered host cell may modify the expression of the enzyme stylopine synthase. Stylopine synthase is encoded by the STS gene. In some examples, stylopine synthase catalyzes the reaction of cheilanthifoline→stylopine, among other reactions, as referenced in FIG. 8. An engineered host cell may be modified to include constitutive expression of the STS gene in the engineered host cell. Additionally or alternatively, the engineered host cell may be modified to synthetically regulate the expression of the STS gene in the engineered host cell. In some examples, the engineered host cell may be modified to incorporate a copy, copies, or additional copies, of the STS gene. Additionally or alternatively, the engineered host cell may be modified to incorporate the introduction of a strong promotor element for the overexpression of the STS gene within the engineered host cell. The STS gene may be derived from P. somniferum, E. californica, A. mexicana, or another species.

[0426] [MSH] In some examples, the engineered host cell may modify the expression of the enzyme cis-N-methylstylopine 14-hydroxylase. Cis-N-methylstylopine 14-hydroxylase is encoded by the MSH gene. In some examples, cis-N-methylstylopine 14-hydroxylase catalyzes the reaction of cis-N-methylstylopine→protopine, as referenced in FIG. 8. An engineered host cell may be modified to include constitutive expression of the MSH gene in the engineered host cell. Additionally or alternatively, the engineered host cell may be modified to synthetically regulate the expression of the MSH gene in the engineered host cell. In some examples, the engineered host cell may be modified to incorporate a copy, copies, or additional copies, of the MSH gene. Additionally or alternatively, the engineered host cell may be modified to incorporate the introduction of a strong promotor element for the overexpression of the MSH gene within the engineered host cell. The MSH gene may be derived from P. somniferum or another species.

[0427] [P6H] In some examples, the engineered host cell may modify the expression of the enzyme protopine-6-hydroxylase. Protopine-6-hydroxylase is encoded by the P6H gene. In some examples, protopine-6-hydroxylase catalyzes the reaction of Protopine→6-hydroxyprotopine, as referenced in FIG. 8. An engineered host cell may be modified to include constitutive expression of the P6H gene in the engineered host cell. Additionally or alternatively, the engineered host cell may be modified to synthetically regulate the expression of the P6H gene in the engineered host cell. In some examples, the engineered host cell may be modified to incorporate a copy, copies, or additional copies, of the P6H gene. Additionally or alternatively, the engineered host cell may be modified to incorporate the introduction of a strong promotor element for the overexpression of the CFS gene within the engineered host cell. The P6H gene may be derived from P. somniferum, E. californica, or another species.

[0428] [DBOX] In some examples, the engineered host cell may modify the expression of the enzyme dihydrobenzophenanthridine oxidase. Dihydrobenzophenanthridine oxidase is encoded by the DBOX gene. In some examples, dihydrobenzophenanthridine oxidase catalyzes the reaction of dihydrosanguinarine→sanguinarine, as referenced in FIG. 8. An engineered host cell may be modified to include constitutive expression of the DBOX gene in the engineered host cell. Additionally or alternatively, the engineered host cell may be modified to synthetically regulate the expression of the DBOX gene in the engineered host cell. In some examples, the engineered host cell may be modified to incorporate a copy, copies, or additional copies, of the DBOX gene. Additionally or alternatively, the engineered host cell may be modified to incorporate the introduction of a strong promotor element for the overexpression of the DBOX gene within the engineered host cell. The DBOX gene may be derived from P. somniferum or another species.

[0429] [ATM] In some examples, the engineered host cell may modify the expression of the enzyme 1, 13-dihydroxy-N-methylcanadine 13-O acetyl transferase. 1, 13-dihydroxy-N-methylcanadine 13-O acetyltransferase is encoded by the AT1 gene. In some examples, 1, 13-dihydroxy-N-methylcanadine 13-O acetyltransferase catalyzes the reaction of 1, 13-dihydroxy-N-methylcanadine→1-hydroxy-13-O-acetyl-N-methylcanadine, as referenced in FIG. 7. FIG. 7 illustrates a biosynthetic scheme for conversion of canadine to noscapine, in accordance with some embodiments of the invention. The engineered host cell may be modified to include constitutive expression of the AT1 gene in the engineered host cell. Additionally or alternatively, the engineered host cell may be modified to synthetically regulate the expression of the AT1 gene in the engineered host cell. In some examples, the engineered host cell may be modified to incorporate a copy, copies, or additional copies, of the AT1 gene. Additionally or alternatively, the engineered host cell may be modified to incorporate the introduction of a strong promoter element for the overexpression of the AT1 gene within the engineered host cell. In some cases, the AT1 gene may be codon optimized for expression in Saccharomyces cerevisiae. The AT1 gene may be derived from P. somniferum, Papaver spp, Plantago arenaria, Rauwolfia heterophylla, Adlumia fungosa, Hydrastis Canadensis, Stylomecon heterophylla, Hypecoum leptocarpum, Dactylicapnos torulosa, Glaucium flavum, Berberis laurina, B. Vulgaris, Corydalis spp, Fumaria spp, Dactylicapnos spp, or another species.

[0430] [CXE1 or CXE2] In some examples, the engineered host cell may modify the expression of the enzyme narcotinehemiacetal synthase. Narcotinehemiacetal synthase is encoded by the CXE1 gene. The enzyme encoded by the CXE2 gene can also function as a narcotinehemiacetal synthase. In some examples, narcotinehemiacetal synthase catalyzes the reaction of 4′-O-desmethyl-3-O-acetylpapaveroxine→narcotolinehemiacetal and 3-O-acetylpapaveroxine→narcotinehemiacetal, as referenced in FIG. 7. The engineered host cell may be modified to include constitutive expression of the CXE1 or CXE2 gene in the engineered host cell. Additionally or alternatively, the engineered host cell may be modified to synthetically regulate the expression of the CXE1 or CXE2 gene in the engineered host cell. In some examples, the engineered host cell may be modified to incorporate a copy, copies, or additional copies, of the CXE1 or CXE2 gene. Additionally or alternatively, the engineered host cell may be modified to incorporate the introduction of a strong promoter element for the overexpression of the CXE1 or CXE2 gene within the engineered host cell. In some cases, the CXE1 or CXE2 gene may be codon optimized for expression in Saccharomyces cerevisiae. The CXE1 or CXE2 gene may be derived from P. somniferum, Papaver spp, Plantago arenaria, Rauwolfia heterophylla, Adlumia fungosa, Hydrastis Canadensis, Stylomecon heterophylla, Hypecoum leptocarpum, Dactylicapnos torulosa, Glaucium flavum, Berberis laurina, B. Vulgaris, Corydalis spp, Fumaria spp, Dactylicapnos spp, or another species.

[0431] [SDR1] In some examples, the engineered host cell may modify the expression of the enzyme noscapine synthase. Noscapine synthase is encoded by the SDR1 gene. In some examples, noscapine synthase catalyzes the reaction of narcotolinehemiacetal→narcotoline, as referenced in FIG. 7. Additionally, noscapine synthase catalyzes the reaction of narcotinehemiacetal→noscapine. The engineered host cell may be modified to include constitutive expression of the SDR1 gene in the engineered host cell. Additionally or alternatively, the engineered host cell may be modified to synthetically regulate the expression of the SDR1 gene in the engineered host cell. In some examples, the engineered host cell may be modified to incorporate a copy, copies, or additional copies, of the SDR1 gene. Additionally or alternatively, the engineered host cell may be modified to incorporate the introduction of a strong promoter element for the overexpression of the SDR1 gene within the engineered host cell. In some cases, the SDR1 gene may be codon optimized for expression in Saccharomyces cerevisiae. The SDR1 gene may be derived from P. somniferum, Papaver spp, Plantago arenaria, Rauwolfia heterophylla, Adlumia fungosa, Hydrastis Canadensis, Stylomecon heterophylla, Hypecoum leptocarpum, Dactylicapnos torulosa, Glaucium flavum, Berberis laurina, B. Vulgaris, Corydalis spp, Fumaria spp, Dactylicapnos spp, or another species.

[0432] [MT2 and MT3] In some examples, the engineered host cell may modify the expression of the enzyme narcotoline 4′-O-methylase. Narcotoline 4′-O-methylase is a heterodimer formed by the O-methyltransferase monomer encoded by the MT2 and MT3 genes. In some examples, narcotoline 4′-O-methylase catalyzes the reaction of narcotoline→noscapine, as referenced in FIG. 7. Additionally, narcotoline 4′-O-methylase catalyzes the reaction of narcotolinenehemiacetal→narcotinehemiacetal and 4′-O-desmethyl-3-O-acetylpapaveroxine→3-O-acetylpapaveroxine. The engineered host cell may be modified to include constitutive expression of the MT2 and MT3 genes in the engineered host cell. Additionally or alternatively, the engineered host cell may be modified to synthetically regulate the expression of the MT2 and MT3 genes in the engineered host cell. In some examples, the engineered host cell may be modified to incorporate a copy, copies, or additional copies, of the MT2 and MT3 genes. Additionally or alternatively, the engineered host cell may be modified to incorporate the introduction of a strong promoter element for the overexpression of the MT2 and MT3 genes within the engineered host cell. In some cases, the MT2 and MT3 genes may be codon optimized for expression in Saccharomyces cerevisiae. The MT2 and MT3 genes may be derived from P. somniferum, Papaver spp, Fumaria parviflora, Plantago arenaria, Rauwolfia heterophylla, or another species.

[0433] [morA] In some examples, the engineered host cell may modify the expression of the enzyme morphine dehydrogenase. Morphine dehydrogenase is encoded by the morA gene. In some examples, morphine dehydrogenase catalyzes the reaction of morphine→morphinone, as referenced in FIG. 4. In other examples, morphine dehydrogenase catalyzes the reaction of codeinone→codeine, also as referenced in FIG. 4. FIG. 4 illustrates a biosynthetic scheme for production of semi-synthetic opiods, in accordance with some embodiments of the invention. In particular, FIG. 4 illustrates extended transformations of thebaine in yeast by incorporating morA, morphine dehydrogenase; and morB, morphine reductase.

[0434] The engineered host cell may be modified to include constitutive expression of the morA gene in the engineered host cell. Additionally or alternatively, the engineered host cell may be modified to synthetically regulate the expression of the morA gene in the engineered host cell. In some examples, the engineered host cell may be modified to incorporate a copy, copies, or additional copies, of the morA gene. Additionally or alternatively, the engineered host cell may be modified to incorporate the introduction of a strong promoter element for the overexpression of the morA gene within the engineered host cell. In some cases, the morA gene may be codon optimized for expression in Saccharomyces cerevisiae. The morA gene may be derived from Pseudomonas putida or another species.

[0435] [morB] In some examples, the engineered host cell may modify the expression of the enzyme morphinone reductase. Morphinone reductase is encoded by the morB gene. In some examples, morphinone reductase catalyzes the reaction of codeinone→hydrocodone, as referenced in FIG. 4. In other examples, morphinone reductase catalyzes the reaction of morphinone→hydromorphone, also as referenced in FIG. 4. In other examples, morphinone reductase catalyzes the reaction 14-hydroxycodeinone→oxycodone. The engineered host cell may be modified to include constitutive expression of the morB gene in the engineered host cell. Additionally or alternatively, the engineered host cell may be modified to synthetically regulate the expression of the morB gene in the engineered host cell. In some examples, the engineered host cell may be modified to incorporate a copy, copies, or additional copies, of the morB gene. Additionally or alternatively, the engineered host cell may be modified to incorporate the introduction of a strong promoter element for the overexpression of the morB gene within the engineered host cell. In some cases, the morB gene may be codon optimized for expression in Saccharomyces cerevisiae. The morB gene may be derived from Pseudomonas putida or another species.

[0436] [CYP80A1] In some examples, the engineered host cell may express the enzyme berbamunine synthase. Berbamunine synthase is encoded by the gene for cytochrome P450 enzyme 80A1 (CYP80A1). In some examples, CYP80A1 catalyzes the reaction (S)-N-methylcoclaurine+(R)-N-methylcoclaurine→berbamunine, as referenced in FIG. 10. In other examples, CYP80A1 catalyzes the reaction (R)-N-methylcoclaurine+(R)-N-methylcoclaurine→guattegaumerine, as referenced in FIG. 10. In other examples, CYP80A1 catalyzes the reaction (R)-N-methylcoclaurine+(S)-coclaurine→2′norberbamunine. The engineered host cell may be modified to include constitutive expression of the CYP80A1 gene in the engineered host cell. Additionally or alternatively, the engineered host cell may be modified to synthetically regulate the expression of the CYP80A1 gene in the engineered host cell. In some examples, the engineered host cell may be modified to incorporate a copy, copies, or additional copies, of the CYP80A1 gene. Additionally or alternatively, the engineered host cell may be modified to incorporate the introduction of a strong promoter element for the overexpression of the CYP80A1 gene within the engineered host cell. In some cases, the CYP80A1 gene may be codon optimized for expression in Saccharomyces cerevisiae. The CYP80A1 gene may be derived from Berberis stolonifera or another species.

[0437] [PODA] In some example, the engineered host cell may express the enzyme protopine O-dealkylase. Protopine O-dealkylase is encoded by the gene PODA. In some examples, PODA catalyzes the O,O-demethylation of protoberberines and protopines such as canadine, stylopine, berberine, cryptopine, allocryptopine, and protopine. In some examples, PODA catalyzes the O-demethylation of BIAs including tetrahydropapaverine, tetrahydropalmatine, and cryptopine. The engineered host cell may be modified to include constitutive expression of the PODA gene in the engineered host cell. Additionally or alternatively, the engineered host cell may be modified to synthetically regulate the expression of the PODA gene in the engineered host cell. In some examples, the engineered host cell may be modified to incorporate a copy, copies, or additional copies, of the PODA gene. Additionally or alternatively, the engineered host cell may be modified to incorporate the introduction of a strong promoter element for the overexpression of the PODA gene within the engineered host cell. In some cases, the PODA gene may be codon optimized for expression in Saccharomyces cerevisiae. The PODA gene may be derived from Papaver somniferum or other species.

[0438] [RNMT] In some examples, the engineered host cell may modify the expression of the enzyme Reticuline N-methyltransferase. Reticuline N-methyltransferase is encoded by the RNMT gene. In some examples, Reticuline N-methyltransferase may catalyze reactions such as reticuline→tembetarine, among other reactions.

[0439] [P7OMT] In some examples, the engineered host cell may modify the expression of the enzyme Papaverine 7-O-demethylase. Papaverine 7-O-demethylase is encoded by the P7OMT gene. In some examples, Papaverine 7-O-demethylase may catalyze reactions such as papaverine→pacodine, among other reactions.

[0440] [3ODM] In some examples, the engineered host cell may modify the expression of the enzyme 3-O-demethylase. 3-O-demethylase is encoded by the 3ODM gene. In some examples, 3-O-demethylase may catalyze reactions such as oxycodone→oxymorphone; hydrocodone→hydromorphone; dihydrocodeine→dihydromorphine; 14-hydroxycodeine→14-hydroxymorphine; codeinone→morphinone; and 14-hydroxycodeinone→14-hydroxymorphinone, among other reactions.

[0441] [NDM] In some examples, the engineered host cell may modify the expression of the enzyme N-demethylase. N-demethylase is encoded by the NDM gene. In some examples, N-demethylase may catalyze reactions, such as Codeine→Norcodeine; Morphine→Normorphine; Oxycodone→Noroxycodone; Oxymorphone→Noroxymorphone; Thebaine→Northebaine; Oripavine→Nororipavine; Hydrocodone→Norhydrocodone; Hydromorphone→Norhydromorphone; Dihydrocodeine→Nordihydrocodeine; Dihydromorphine→Nordihydromorphine; 14-hydroxycodeine→Nor-14-hydroxycodeine; 14-hydroxymorphine→Nor-14-hydroxymorphine; Codeinone→Norcodeinone; Morphinone→Normorphinone; 14-hydroxycodeinone→Nor-14-hydroxycodeinone; and 14-hydroxymorphinone→Nor-14-hydroxymorphinone, among other reactions.

[0442] [NMT] In some examples, the engineered host cell may modify the expression of the enzyme N-methyltransferase. N-methyltransferase is encoded by the NMT gene. In some examples, N-methyltransferase may catalyze reactions, such as Norcodeine→codeine; Normorphine→morphine; Noroxycodone→oxycodone; Noroxymorphone→noroxymorphone; Northebaine→thebaine; Nororipavine→oripavine; Norhydrocodone→hydrocodone; Norhydromorphone→Hydromorphone; Nordihydrocodeine→Dihydrocodeine; Nordihydromorphine→Dihydromorphine; Nor-14-hydroxycodeine→14-hydroxycodeine; Nor-14-hydroxymorphine→14-hydroxymorphine; Norcodeineone→Codeineone; Normorphinone→Morphinone; Nor-14-hydroxy-codeinone→14-hydroxycodeinone; Nor-14-hydroxy-morphinone→14-hydroxymorphinone.

[0443] [NAT] In some examples, the engineered host cell may modify the expression of the enzyme N-allyltransferase. N-allyltransferase is encoded by the NAT gene. In some examples, N-allyltransferase may catalyze reactions, such as Norcodeine→N-allyl-norcodeine; Normorphine→N-allyl-normorphine; Noroxycodone→N-allyl-noroxycodone; Noroxymorphone→N-allyl-nornoroxymorphone; Northebaine→N-allyl-northebaine; Nororipavine→N-allyl-nororipavine; Norhydrocodone→N-allyl-norhydrocodone; Norhydromorphone→N-allyl-norhydromorphone; Nordihydrocodeine→N-allyl-nordihydrocodeine; Nordihydromorphine→N-allyl-nordihydromorphine; Nor-14-hydroxycodeine→N-allyl-nor-14-hydroxycodeine; Nor-14-hydroxymorphine→N-allyl-nor-14-hydroxymorphine; Norcodeineone→N-allyl-norcodeineone; Normorphinone→N-allyl-normorphinone; Nor-14-hydroxy-codeinone→N-allyl-nor-14-hydroxycodeinone; Nor-14-hydroxy-morphinone→N-allyl-nor-14-hydroxymorphinone, among other reactions.

[0444] [CPMT] In some examples, the engineered host cell may modify the expression of the enzyme N-cyclopropylmethyltranserase. N-cyclopropylmethyltranserase is encoded by the CPMT gene. In some examples, N-cyclopropylmethyltransferase may catalyze reactions, such as Norcodeine→N(cyclopropylmethyl)norcodeine; Normorphine→N(cyclopropylmethyl) normorphine; Noroxycodone→N(cyclopropylmethyl) noroxycodone; Noroxymorphone→N(cyclopropylmethyl) nornoroxymorphone; Northebaine→N(cyclopropylmethyl) northebaine; Nororipavine→N(cyclopropylmethyl) nororipavine; Norhydrocodone→N(cyclopropylmethyl) norhydrocodone; Norhydromorphone→N(cyclopropylmethyl)norhydromorphone; Nordihydrocodeine→N(cyclopropylmethyl)nordihydrocodeine; Nordihydromorphine→N(cyclopropylmethyl)nordihydromorphine; Nor-14-hydroxycodeine→N(cyclopropylmethyl)nor-14-hydroxycodeine; Nor-14-hydroxymorphine→N(cyclopropylmethyl)nor-14-hydroxymorphine; Norcodeineone→N(cyclopropylmethyl)norcodeineone; Normorphinone→N(cyclopropylmethyl)normorphinone; Nor-14-hydroxy-codeinone→N(cyclopropylmethyl)nor-14-hydroxycodeinone; and Nor-14-hydroxy-morphinone→N(cyclopropylmethyl)nor-14-hydroxymorphinone, among other reactions.

[0445] [BM3] In some examples, the engineered host cell may express the enzyme BM3. BM3 is a Bacillus megaterium cytochrome P450 involved in fatty acid monooxygenation in its native host. In some cases BM3 N-demethylates an opioid to produce a nor-opioid. In some cases the host cell is modified to express BM3 in addition to other heterologous enzymes for the production of a nal-opioid or nor-opioid. The engineered host cell may be modified to include constitutive expression of the BM3 gene in the engineered host cell. Additionally or alternatively, the engineered host cell may be modified to synthetically regulate the expression of the BM3 gene in the engineered host cell. In some examples, the engineered host cell may be modified to incorporate a copy, copies, or additional copies, of the BM3 gene. Additionally or alternatively, the engineered host cell may be modified to incorporate the introduction of a strong promoter element for the overexpression of the BM3 gene within the engineered host cell. BM3 has several advantages as a biosynthetic enzyme including that it is soluble, comes with a fused reductase partner protein, and can readily be engineered to accept new substrates. Additionally, Table 9 illustrates variants of BM3 N-demethylases.

[0446] Examples of the aforementioned genes can be expressed from a number of different platforms in the host cell, including plasmid ARS/CEN), YAC, or genome. In addition, examples of the aforementioned gene sequences can either be native or codon optimized for expression in the desired heterologous host (e.g., Saccharomyces cerevisiae).

### EXAMPLES

[0447] The following examples are given for the purpose of illustrating various some embodiments of the invention and are not meant to limit the invention in any fashion. Where indicated, expression constructs are understood to incorporate a suitable promoter, gene, and terminator, even if the exact terminator sequence used is not specified. The present examples, along with the methods described herein are presently representative of preferred embodiments, are exemplary, and are not intended as limitations on the scope of the invention. Changes therein and other uses which are encompassed within the spirit of the invention as defined by the scope of the claims will occur to those skilled in the art.

### Example 1: Bioinformatic Identification of Enzymes for Morphinan Alkaloid Production

[0448] The OneKP (Matasci N et al. 2014. Data access for the 1,000 Plants (1KP) project. Gigascience 3:17) and plant transcriptome database was queried with amino acid sequences of representative variants from each of the hypothesized classes of enzymes. In particular, the Papaver genus, which includes many plant species that produce benzylisoquinoline alkaloids of interest, were searched. The list of candidate sequences from these plants were narrowed down using an e-value cutoff of 10⁻⁵⁰ to the representative sequence. For some candidates, the complete sequence was not present in the assembled transcriptome. In these cases, the sequence was completed using raw sequencing reads.

### Example 2: Platform Yeast Strains Engineered to Produce (S)-Reticuline from Glucose and Simple Nitrogen Sources

[0449] A platform yeast strain that produces the significant branch point BIA intermediate (S)-reticuline from L-tyrosine was constructed (FIG. 19). Specifically, four multi-gene expression constructs were integrated into the genome of a yeast strain. The composition of the four constructs is indicated in FIG. 19. Each construct is comprised of 4 or 5 genes expressed from yeast promoters. Genes are positioned at each locus as complete expression cassettes comprising a promoter, gene open reading frame, and terminator as specified in the annotations above the schematic. The schematic shows the orientation of each expression cassette by the direction of the arrow representing a given gene. Selectable markers are italicized in the annotation and represented by grey arrows in the schematic. Each selection marker is flanked by loxP sites to allow removal of the marker from the locus. Additionally, each construct has a selectable marker flanked by loxP sites so that it can be removed by Cre recombinase.

[0450] In the first integration construct, four heterologous genes from Rattus norvegicus are integrated into the YBR197C locus together with a G418 selection marker (KanMX). RnPTPS, RnSepR, RnPCD, and RnQDHPR are required to synthesize and regenerate tetrahydrobiopterin (BH₄) from the yeast endogenous folate synthesis pathway as indicated in FIG. 2. Each gene is codon optimized for expression in yeast.

[0451] In the second integration construct, four heterologous genes are integrated into the HISS locus together with the HISS selection marker. Rattus norvegicus tyrosine hydroxylase (RnTyrH) converts tyrosine to L-DOPA using the cosubstrate BH₄ generated by the preceding integration construct. The RnTyrH gene can be any of the wild-type or improved mutants which confer enhanced activity (e.g., W166Y, R37E, and R38E). A second Rattus norvegicus gene, RnDHFR, encodes an enzyme that reduces dihydrobiopterin (an oxidation product of BH₄) to BH₄, in this way increasing the availability of this cosubstrate. Also included in the third construct is PpDODC from Pseudomonas putida, an enzyme that converts L-DOPA to dopamine. The fourth enzyme is CjNCS from Coptis japonica, which condenses 4-HPA and dopamine to make norcoclaurine. Each gene is codon optimized for expression in yeast.

[0452] In the third integration construct, five heterologous genes from plants and the LEU2 selection marker are integrated into the locus YDR514C. Ps6OMT, Ps4'OMT, and PsCNMT are methyltransferases from Papaver somniferum and are expressed as native plant nucleotide sequences. A fourth P. somniferum gene, yPsCPRv2, is codon optimized for yeast and encodes a reductase that supports the activity of a cytochrome P450 from Eschscholzia californica, EcCYP80A1. The enzymes encoded in this construct perform two O-methylations, an N-methylation, and a hydroxylation to produce reticuline from the norcoclaurine produced by the preceding integration construct. Each gene is codon optimized for expression in yeast.

[0453] In the final integration construct, additional copies of Saccharomyces cerevisiae endogenous genes ARO4^{Q166K}, ARO7^{T226I}, TYR1, and ARO10 are integrated into the ARO4 locus together with a hygromycin resistance selection marker. ARO4^{Q166K} and ARO7^{T226I} are feedback-resistant mutants of ARO4 and ARO7 which each encode a single base pair substitution relative to the wild-type sequence. TYR1 and ARO10 are identical to the native yeast genes, but are expressed behind strong promoters. Aro4p and Aro7p are enzymes in the biosynthesis of aromatic amino acids including tyrosine. Removing feedback inhibition from these enzymes results in upregulation of endogenous tyrosine biosynthesis. Overexpression of Tyr1p upregulates tyrosine biosynthesis and thus production of tyrosine. Overexpression of Aro10p increases the production of 4-HPA.

[0454] Platform yeast strains can be constructed with any number of the four expression cassettes. Specifically, platform yeast strains were constructed with integration constructs 1˜4 and integration constructs 1-3. In the latter strain in which the tyrosine over-production construct (construct 4) is excluded, additional tyrosine may be supplied in the culture medium to support the biosynthesis of reticuline. Additional genetic modifications may be incorporated into the platform strains to support production of downstream BIAs and increased flux to BIA biosynthesis.

[0455] The yeast strains were grown in synthetic complete media with the appropriated amino acid drop out solution at 28° C. BIA metabolites in the media supernatant were analyzed after 48 and 96 hours of growth by LC-MS/MS analysis.

### Example 3: Platform Yeast Strains Engineered to Produce Thebaine from Glucose and Simple Nitrogen Sources

[0456] Yeast strains can be engineered for the production of the morphinan alkaloid thebaine from early precursors such as tyrosine. As an example, the platform yeast strains described in Example 2 can be further engineered to produce the morphinan alkaloid products from L-tyrosine (FIG. 20).

[0457] The platform yeast strain producing (S)-reticuline from L-tyrosine (see description in Example 2) was further engineered to incorporate an engineered split epimerase DRS-DRR, an engineered salutaridine synthase, salutaridine reductase, salutaridinol acetyltransferase, and thebaine synthase to convert the biosynthesized (S)-reticuline to the first morphinan alkaloid thebaine (FIG. 4). Three expression cassettes (P_{TDH3}-yEcCFS¹⁻²⁶-yPbSS³³⁻⁵⁰⁴, P_{TP11}-yPbSalR, P_{TEF1}-yPsSalAT) were assembled into an integration construct with a URA3 selective marker and integrated into the locus TRP1 in the platform yeast strain. An additional three expression cassettes (P_{TDH3}-yPbDRS, P_{TEF1}-yPbDRR, P_{PGK1}-yPsTS) were assembled into an integration construct with a bleR selective marker and integrated into the locus YPL250CΔ in the platform yeast strain. The composition of the two constructs is indicated in FIG. 20.

[0458] The yeast strains harboring the integrated cassettes were grown in synthetic complete media with the appropriated drop out solution at 28° C. After 96 hours of growth, the media was analyzed for BIA metabolites by LC-MS/MS analysis.

### Example 4: Yeast Strains Engineered to Produce Downstream Morphinan Alkaloids from Glucose and Simple Nitrogen Sources

[0459] Yeast strains can be engineered for the production of the downstream morphinan alkaloids from early precursors such as tyrosine. As an example, the platform yeast strains described in Example 3 can be further engineered to produce the downstream morphinan alkaloid products from L-tyrosine (FIG. 4).

[0460] The platform yeast strain producing thebaine from L-tyrosine (see description in Example 3) was further engineered to incorporate thebaine 6-O-demethylase, neopinone isomerase, codeinone reductase, and codeinone-O-demethylase to convert the biosynthesized thebaine to the downstream morphinan alkaloids including morphine (FIG. 20). Four expression cassettes (P_{GPD}-T6ODM, P_{PGK1}-COR, P_{ADH1}-CODM, P_{TP11}-yPsNPI) were directly assembled with a KanMX selective marker and integrated into the HOΔ locus in the thebaine platform yeast strain to create a morphine-producing yeast strain (Thodey et al., 2014). Three expression cassettes (P_{GPD}-T6ODM, P_{PGK1}-COR, P_{TPH}-yPsNPI) were directly assembled with a KanMX selective marker and integrated into the HOΔ locus in the thebaine platform yeast strain to create a codeine-producing yeast strain.

[0461] The yeast strains harboring the integrated cassettes were grown in synthetic complete media with the appropriated drop out solution at 28° C. After 96 hours of growth, the media was analyzed for BIA metabolites by LC-MS/MS analysis.

### Example 5: Yeast Strains Engineered to Produce Semi-Synthetic Opioids from Glucose and Simple Nitrogen Sources

[0462] Yeast strains can be engineered for the production of the downstream semi-synthetic morphinan alkaloids from early precursors such as tyrosine. As an example, the yeast strains described in Examples 3 and 4 can be further engineered to produce the semi-synthetic opioid products from L-tyrosine (FIG. 4).

[0463] The yeast strains producing thebaine from L-tyrosine (see description in Examples 3 and 4) were further engineered to incorporate thebaine 6-O-demethylase, neopinone isomerase, and morphinone reductase to convert the biosynthesized thebaine to the semi-synthetic morphinan alkaloid hydrocodone (FIG. 20). Three expression cassettes (P_{GPD}-T6ODM, P_{PGK1}-morB, P_{TP11}-yPsNPI) were directly assembled with a KanMX selective marker and integrated into the HOΔ locus in the thebaine platform yeast strain to create a hydrocodone-producing yeast strain (Thodey et al., 2014).

[0464] The yeast strains harboring the integrated cassettes were grown in synthetic complete media with the appropriated drop out solution at 28° C. After 96 hours of growth, the media was analyzed for BIA metabolites by LC-MS/MS analysis.

### Example 6: Production of Downstream Morphinan Alkaloids from Glucose and Simple Nitrogen Sources Via Engineered Yeast Strains

[0465] Yeast strains were engineered as described in Examples 2, 3, and 4 to produce the downstream morphinan alkaloids codeine and morphine directly from simple sugars (e.g., glucose) and nitrogen sources present in standard growth media. Specifically, a CEN.PK strain of Saccharomyces cerevisiae was engineered to express the following heterologous enzymes via integration into the yeast chromosome: TyrH, DODC, PTPS, SepR, PCD, QDHPR, NCS, 6OMT, CNMT, CYP80B1, CPR, 4OMT, DRS, DRR, SalSyn, SalR, SalAT, TS, T6ODM, COR (variant 1.3, SEQ ID NO. 87). A version of this yeast strain was also engineered to express CODM via integration into the yeast chromosome. In this example, the SalSyn enzyme is engineered to have its leader sequence replaced with 83 amino acids from the N-terminus of Eschscholzia californica chelanthifoline synthase (EcCFS). Additional modifications were made to the strain to increase BIA precursor accumulation, including: overexpression of ARO10, overexpression of TYR1, expression of a feedback resistant ARO4 (ARO4^{Q166K}), and expression of a feedback resistant ARO7 (ARO7^{T226I}). Separate engineered yeast strains were made as described, harboring different variants of enzymes encoding neopinone isomerase activity (NPI), including SEQ ID NO. 83, which is a variant of SEQ ID NO. 82 with a N-terminal truncation of the first 18 amino acids (i.e., NPI (truncated)), and no neopinone isomerase enzyme (codeine-producing strain: YA1033; morphine-producing strain: YA1022). The sequences of the enzyme variants are provided in Table 3.

[0466] The described yeast strains were inoculated into 2 ml of synthetic complete media (yeast nitrogen base and amino acids) with 2% glucose and grown for approximately 4 hours at 28° C. Then, 10 uL of each culture was transferred to 400 uL of fresh media in a 96-well plate in replicates of 4 and grown for an additional 48 hours at 28° C. The production media contains 1× yeast nitrogen broth and amino acids, 20 mM ascorbic acid, 300 mg/L tyrosine, 40 g/L maltodextrin, and 2 units/L amylase. The amylase is used to mimic a fed-batch process and gradually releases glucose from maltodextrin polymer so that the yeast can use it as a carbon source. The cells were separated from the media by centrifugation, and thebaine concentration was measured directly in the supernatant by LC-MS/MS analysis.

[0467] Engineered codeine-producing yeast strains produced thebaine, codeine, and other benzylisoquinoline alkaloids from glucose and simple nitrogen sources present in the growth media (FIG. 21). Engineered morphine-producing yeast strains produced thebaine, codeine, morphine, and other benzylisoquinoline alkaloids from glucose and simple nitrogen sources present in the growth media (FIG. 22). In all cases, strains harboring a neopinone isomerase activity produced higher levels of the morphinan alkaloid isomer products with a carbon-carbon double bond between carbons C-8 and C-7 (i.e., codeine and morphine) relative to strains not harboring this activity under the described fermentation conditions.

### Example 7: Production of Downstream Semi-Synthetic Opioids from Glucose and Simple Nitrogen Sources Via Engineered Yeast Strains

[0468] Yeast strains were engineered as described in Examples 2, 3, 4, and 5 to produce the downstream semi-synthetic opioid hydrocodone directly from simple sugars (e.g., glucose) and nitrogen sources present in standard growth media. Specifically, a CEN.PK strain of Saccharomyces cerevisiae was engineered to express the following heterologous enzymes via integration into the yeast chromosome: TyrH, DODC, PTPS, SepR, PCD, QDHPR, NCS, 6OMT, CNMT, CYP80B1, CPR, 4OMT, DRS, DRR, SalSyn, SalR, SalAT, TS, T6ODM, morB. In this example, the SalSyn enzyme is engineered to have its leader sequence replaced with 83 amino acids from the N-terminus of Eschscholzia californica chelanthifoline synthase (EcCFS). Additional modifications were made to the strain to increase BIA precursor accumulation, including: overexpression of ARO10, overexpression of TYR1, expression of a feedback resistant ARO4 (ARO4^{Q166K}), and expression of a feedback resistant ARO7 (ARO7^{T226I}). Separate engineered yeast strains were made as described, harboring different variants of enzymes encoding neopinone isomerase activity (NPI), including SEQ ID NO. 82 (i.e., NPI (full-length)) and SEQ ID NO. 83, which is a variant of SEQ ID NO. 82 with a N-terminal truncation of the first 18 amino acids (i.e., NPI (truncated)), and no neopinone isomerase enzyme (YA1046). The sequences of the enzyme variants are provided in Table 3.

[0469] The described yeast strains were inoculated into 2 ml of synthetic complete media (yeast nitrogen base and amino acids) with 2% glucose and grown for approximately 4 hours at 28° C. Then, 10 uL of each culture was transferred to 400 uL of fresh media in a 96-well plate in replicates of 4 and grown for an additional 48 hours at 28° C. The production media contains 1× yeast nitrogen broth and amino acids, 20 mM ascorbic acid, 300 mg/L tyrosine, 40 g/L maltodextrin, and 2 units/L amylase. The amylase is used to mimic a fed-batch process and gradually releases glucose from maltodextrin polymer so that the yeast can use it as a carbon source. The cells were separated from the media by centrifugation, and thebaine concentration was measured directly in the supernatant by LC-MS/MS analysis.

[0470] Engineered hydrocodone-producing yeast strains produced thebaine, hydrocodone, and other benzylisoquinoline alkaloids from glucose and simple nitrogen sources present in the growth media (FIG. 23). In all cases, strains harboring a neopinone isomerase activity produced higher levels of the morphinan alkaloid isomer products with a carbon-carbon double bond between carbons C-8 and C-7 (i.e., hydrocodone) relative to strains not harboring this activity under the described fermentation conditions.

### Example 8: Microbial Strains Engineered to Produce O-Demethylated Opioid Compounds from Glucose and Simple Nitrogen Sources

[0471] Enzymes listed in Table 6 that displayed O-demethylase activity on morphinan alkaloids, were incorporated into a microbial strain (either Saccharomyces cerevisiae or Escherichia coli) which biosynthesizes morphinan alkaloids de novo (as described in Examples 3, 4, and 5). The complete BIA biosynthetic pathway uses L-tyrosine produced by the host cell and/or supplemented in the culture medium. Two molecules of tyrosine are modified and condensed to form the first benzylisoquinoline structure, which may be either norcoclaurine or norlaudanosoline. The benzylisoquinoline is further modified to form (S)-reticuline and then stereochemically inverted by the activity of an epimerase enzyme to yield (R)-reticuline. (R)-reticuline undergoes a carbon-carbon coupling reaction to form the first promorphinan, salutaridine, and is further modified before undergoing an oxygen-carbon coupling reaction catalyzed by a thebaine synthase to arrive at the first morphinan alkaloid structure, thebaine (see FIG. 4). Table 5 lists enzymes and activities in the complete pathway.

[0472] FIG. 6 illustrates a biosynthesis scheme in a microbial cell, in accordance with some embodiments of the invention. Tyrosine produced endogenously by the cell and/or supplied in the culture medium is converted to oxycodone (broken arrows represent multiple enzymatic steps). The oxycodone is then 3-O-demethylated to oxymorphone and N-demethylated to noroxymorphone. Finally, an N-methyltransferase accepts allyl and cyclopropylmethyl carbon moieties from SAM analogues to produce naloxone and naltrexone, respectively.

[0473] To detect O-demethylase activity in strains producing morphinan alkaloid molecules, cells expressing candidate enzymes, either from plasmid vectors or chromosomally-integrated cassettes, were propagated by fermentation and cell supernatants were collected to analyze the total opioid profile (as described above). O-demethylation of opioid molecules in strains harboring the complete BIA pathway was detected by LC-MS (as described above). Specifically, the conversion of oxycodone to oxymorphone was detected. To detect O-demethylation activity via biocatalysis, strains were cultured in selective medium and then lysed by glass bead disruption. Cell lysates were supplied exogenously with opioid substrates (see FIGS. 11 and 12), and other cofactors necessary for enzyme function. O-demethylation of opioid molecules was detected by LC-MS.

### Example 9: Microbial Strains Engineered to Produce N-Demethylated Opioid Compounds from Glucose and Simple Nitrogen Sources

[0474] Enzymes listed in Table 7, that displayed N-demethylase activity on morphinan alkaloids, were incorporated into a microbial strain (either Saccharomyces cerevisiae or Escherichia coli) which biosynthesizes morphinan alkaloids de novo (as described in Examples 3, 4, and 5). The complete BIA biosynthetic pathway uses L-tyrosine produced by the host cell and/or supplemented in the culture medium. Two molecules of tyrosine are modified and condensed to form the first benzylisoquinoline structure which may be either norcoclaurine or norlaudanosoline. The benzylisoquinoline is further modified to form (S)-reticuline and then stereochemically inverted by the activity of an epimerase enzyme to yield (R)-reticuline. (R)-reticuline undergoes a carbon-carbon coupling reaction to form the first promorphinan, salutaridine, and is further modified before undergoing an oxygen-carbon coupling reaction catalyzed by a thebaine synthase to arrive at the first morphinan alkaloid structure, thebaine (see FIG. 4). Table 5 lists enzymes and activities in the complete pathway.

[0475] To detect N-demethylase activity in strains producing morphinan alkaloid molecules, cells expressing candidate enzymes, either from plasmid vectors or chromosomally-integrated cassettes, were propagated by fermentation and cell supernatants were collected to analyze the total opioid profile (as described above). N-demethylation of opioid molecules in strains harboring the complete BIA pathway was detected by LC-MS (as described above). Specifically, the conversion of oxymorphone to noroxymorphone was detected. To detect N-demethylation activity via biocatalysis, strains were cultured in selective medium and then lysed by glass bead disruption. Cell lysates were supplied exogenously with opioid substrates (see FIGS. 13 and 24), and other cofactors necessary for enzyme function. N-demethylation of opioid molecules was detected by LC-MS.

### Example 10: Microbial Strains Engineered to Produce Nal-Opioid Compounds from Glucose and Simple Nitrogen Sources

[0476] Enzymes listed in Table 8, that displayed N-methylase activity on morphinan alkaloids, were incorporated into a microbial strain (either Saccharomyces cerevisiae or Escherichia coli) which biosynthesizes morphinan alkaloids de novo (as described in Examples 3, 4, and 5). FIG. 6 shows an example of the complete reaction scheme from the precursor molecule thebaine to the final nal-opioid compounds naloxone and naltrexone. These strains additionally express enzymes from Examples 8 and 9 and Table 5, that are responsible for generating nor-opioid compounds from the complete BIA pathway. N-methylase enzymes were also expressed in a microbial strain (either Cen.PK2 for S. cerevisiae or BL21 for E. coli, for example) lacking the biosynthetic pathway, to generate a strain that is capable of biocatalysis of several different exogenously-supplied substrate molecules. The complete BIA biosynthetic pathway uses tyrosine produced by the host cell and/or supplemented in the culture medium. Two molecules of tyrosine are modified and condensed to form the first benzylisoquinoline structure which may be either norcoclaurine or norlaudanosoline. The benzylisoquinoline is further modified to form (S)-reticuline and then stereochemically inverted by the activity of an epimerase enzyme to yield (R)-reticuline. (R)-reticuline undergoes a carbon-carbon coupling reaction to form the first promorphinan, salutaridine, and is further modified before undergoing an oxygen-carbon coupling reaction catalyzed by a thebaine synthase to arrive at the first morphinan alkaloid structure, thebaine (see FIG. 4). Table 5 lists enzymes and activities in the complete pathway.

[0477] To detect N-modifying activity in strains with the complete BIA pathway to nor-opioids (see FIG. 6), cells expressing candidate enzymes were propagated by fermentation (as described above) and incubated with SAM or SAM analogs, such as those listed in FIG. 18. Enzymatic modification of nor-opioid or other BIA molecules in strains harboring the complete BIA pathway was detected in supernatants by LC-MS (as described above). To detect N-modifying activity via biocatalysis, strains were cultured in selective medium and then lysed by glass bead disruption. Cell lysates were supplied exogenously with SAM or SAM analogs, and other cofactors necessary for enzyme function. Specifically, the conversion of noroxymorphone to naloxone and naltrexone (using the SAM analogs allyl-SAM or cyclopropane-SAM, as shown in FIG. 18) was detected. Modification of nor-opioid or other BIA molecules was detected by LC-MS. To detect N-modifying activity by biocatalysis in a strain that does not have the complete BIA pathway, Cen.PK2 strains expressing the described heterologous enzymes were grown in selective medium and lysed by glass bead disruption. Cell lysates were supplied exogenously with SAM or SAM analogs, cofactors necessary for enzyme function, and nor-opioid molecules such as those listed in FIG. 18 and Table 5. Modification of these compounds was detected by LC-MS.

TABLE 5
List of enzymes

| Enzyme | Abbrev | Catalyzed Reactions | Source organisms | Genbank # |
|---|---|---|---|---|
| Transketolase | TKL1 | fructose-6-phosphate + | Saccharomyces cerevisiae | NP_015399.1 |
| | | glyceraldehyde-3-phosphate ↔ | | |
| | | xylulose-5-phosphate + | | |
| Glucose-6-phosphate | ZWF1 | glucose-6-phosphate → 6- | Saccharomyces cerevisiae | CAA96146.1 |
| dehydrogenase | | phosphogluconolactone (EC 1.1.1.49) | | |
| Prephenate dehydrogenase | TYR1 | prephenate + NADP⁺ → 4- | Saccharomyces cerevisiae | CAA85127.1 |
| | | hydroxyphenylpyruvate + CO₂ + NADPH | | |
| | | (EC 1.3.1.13) | | |
| 3-deoxy-d-arabinose- | ARO4, | erythrose-4-phosphate + PEP → | Saccharomyces cerevisiae | CAA85212.1 |
| heptulosonate-7-phosphate | DAHP | DAHP (EC 2.5.1.54) | | |
| synthase | synthase | | | |
| Chorismate mutase | ARO7 | chorismate → prephenate | Saccharomyces cerevisiae | NP_015385.1 |
| | | (EC 5.4.99.5) | | |
| Phenylpyruvate decarboxylase | ARO10 | hydroxyphenylpyruvate → 4HPA | Saccharomyces cerevisiae | NP_010668.3 |
| | | (EC 4.1.1.80) | | |
| Alcohol dehydrogenase | ADH2-7, | 4HPA →tyrosol (EC 1.1.1.90) | Saccharomyces cerevisiae | NP_014032.1, |
| | SFA1 | | | AAT93007.1, |
| | | | | NP_011258.2, |
| | | | | NP_009703.3, |
| | | | | NP_014051.3, |
| | | | | NP_010030.1, |
| | | | | NP_010113.1 |
| Aldehyde oxidase | ALD2-6 | 4HPA → hydroxyphenylacetic | Saccharomyces cerevisiae | NP_013893.1, |
| | | acid (EC 1.2.1.39) | | NP_013892.1, |
| | | | | NP_015019.1, |
| | | | | NP_010996.2, |
| | | | | NP_015264.1 |
| Aryl-alcohol | AAD4, 6, | aromatic aldehyde + NAD⁺ → | Saccharomyces cerevisiae | GAX67600, |
| dehydrogenase | 10, 14-16 | aromatic alcohol + NADH | | GAX72034, |
| | | (EC 1.1.1.90) | | AAT93180, |
| | | | | AAS56234, |
| | | | | NP_012689, |
| | | | | GAX69843, |
| | | | | NP_014477, |
| | | | | AAS56127 |
| Aldehyde reductase | ARI1 | aldehyde → alcohol | Saccharomyces cerevisiae | KZV11071.1 |
| Transcription regulator of | OPI1 | knockout phenotype: | Saccharomyces cerevisiae | KZV10697.1 |
| phospholipid biosynthetic | | overproduction of inositol | | |
| genes | | | | |
| Aromatic | ARO9 | hydroxyphenylpyruvate + L- | Saccharomyces cerevisiae | AEC14313.1 |
| aminotransferase | | alanine ↔ tyrosine + pyruvate | | |
| | | (EC 2.6.1.58) | | |
| Aromatic | ARO8 | hydroxyphenylpyruvate + | Saccharomyces cerevisiae | KZV11027.1 |
| aminotransferase | | glutamate ↔ tyrosine + alpha- | | |
| | | ketogluterate (EC 2.6.1.5) | | |
| Tyrosinase | TYR | tyrosine → L-DOPA, L-DOPA | Ralstonia solanacearum, | NP_518458.1, |
| | | dopaquinone (EC 1.14.18.1) | Agaricus bisporus | AJ223816, |
| Tyrosine hydroxylase | TyrH | tyrosine → L-DOPA | Homo sapiens, | NM 012740, |
| | | (EC 1.14.16.2) | Rattus norvegicus, | NM 000240 |
| | | | Mus musculus | |
| L-DOPA | DODC | L-DOPA → dopamine | Pseudomonas putida, | AE015451.1, |
| decarboxylase | | ( EC 4.1.1.28) | Rattus norvegicus | NP_001257782.1 |
| Tyrosine/DOPA | TYDC | L-DOPA → dopamine | Papaver somniferum | AAA97535 |
| decarboxylase | | ( EC 4.1.1.28) | | |
| | | tyrosine → tyramine (EC 4.1.1.25) | | |
| Monoamine oxidase | MAO | dopamine → 3,4-DHPA | E. coli, Homo sapiens, | J03792, |
| | | (EC 1.4.3.4) | Micrococcus luteus | D2367, |
| | | | | AB010716.1 |
| Norcoclaurine synthase | NCS | 4HPA + dopamine → S- | Coptis japonica, Papaver | BAF45337.1, |
| | | norcoclaurine (EC 4.2.1.78) | somniferum, Papaver | AB267399.2, |
| | | 3,4-DHPA + dopamine → S- | bracteatum, Thalicitum flavum, | ACI45396.1, |
| | | norlaudanosoline | Corydalis saxicola | ACO90258.1, |
| | | | | ACO90247.1, |
| | | | | AEB71889.1 |
| Norcoclaurine 6-O- | 6OMT | Norcoclaurine → coclaurine | P. somniferum | AY268894 |
| methyltransferase | | Norlaudanosoline → | T. flavum | AY610507 |
| | | 3′hydroxycoclaurine EC | Coptis japonica* | D29811 |
| Coclaurine-N- | CNMT | Coclaurine → N- | P. somniferum | AY217336 |
| methyltransferase | | methylcoclaurine | T. flavum | AY610508 |
| | | 3′hydroxycoclaurine → 3′- | Coptis japonica* | AB061863 |
| | | hydroxy-N- methylcoclaurine | | |
| 4′-O-methyltransferase | 4′OMT | 3′-hydroxy-N-methylcoclaurine → | P. somniferum | AY217333, |
| | | Reticuline EC 2.1.1.116 | T. flavum | AY217334 |
| | | | Coptis japonica* | AY610510 |
| | | | | D29812 |
| Cytochrome P450 80B1 | CYP80B1 | N-methylcoclaurine → 3′-hydroxy- | P. somniferum, | AAF61400.1 |
| | | N-methylcoclaurine | E. californica, | AAC39453.1 |
| | | (EC 1.14.13.71) | T. flavum | AAU20767.1 |
| GTP cyclohydrolase | FOL2 | GTP → dihydroneopterin | Saccharomyces cerevisiae, | CAA97297.1, |
| | | triphosphate (EC 3.5.4.16) | Homo sapiens, | NP_001019195.1, |
| | | | Mus musculus | NP_032128.1 |
| 6-pyruvoyl | PTPS | dihydroneopterin triphosphate → | Rattus norvegicus, | AAH59140.1, |
| tetrahydrobiopterin (PTP) | | PTP (EC 4.2.3.12) | Homo sapiens, | BAA04224.1, |
| synthase | | | Mus musculus | AAH29013.1 |
| Sepiapterin reductase | SepR | PTP → BH4 (EC 1.1.1.153) | Rattus norvegicus, | NP_062054.1, |
| | | | Homo sapiens, | NP_003115.1, |
| | | | Mus musculus | NP_035597.2 |
| 4a- | PCD | 4a-hydroxytetrahydrobiopterin → | Rattus norvegicus, | NP_001007602.1, |
| hydroxytetrahydrobiopterin | | H2O + quinoid | Homo sapiens, | AAB25581.1, |
| (pterin-4α-carbinolamine) | | dihydropteridine (EC 4.2.1.96) | Mus musculus | NP_ 079549.1 |
| dehydratase | | | | |
| Quinoid dihydropteridine | QDHPR | quinoid dihydropteridine → BH4 | Rattus norvegicus, | AAH72536.1, |
| reductase | | (EC 1.5.1.34) | Homo sapiens, | NP_000311.2, |
| | | | Mus musculus | AAH02107.1 |
| Dihydrofolate reductase | DHFR | 7,8-Dihydrobiopterin → 5,6,7,8- | Rattus norvegicus, | AF318150.1 |
| | | Tetrahydrobiopterin (BH4) | Homo sapiens | |
| | | EC 1.5.1.3 | | |
| 1-benzylisoquinoline alkaloid | DRS-DRR | (S)-reticuline −> (R)-reticuline | Papaver bracteatum, Papaver | P0DKI7.1, |
| epimerase (cytochrome | (CYP-COR) | (S)-1-benzylisoquinoline −> (R)-1- | somniferum, Papaver | AKO60175.1, |
| P450 82Y2-codeinone | | benzylisoquinoline | setigerum, Chelidonium majus | AKO60180.1, |
| reductase; dehydroreticuline | | EC 1.5.1.27 | | AKO60179.1, |
| synthase-dehydroreticuline | | | | AKO60175.1 |
| reductase) | | | | |
| (R)-reticuline, NADPH:oxygen | SalSyn | (R)-reticuline + NADPH + H+ + O2 → | Papaver somniferum, | EF451150 |
| oxidoreductase (C-C phenol- | | salutaridine + NADP+ + 2 H2O | Papaver spp | (Ref PMID |
| coupling), also known as | | EC 1.14.21.4 | Chelidonium majus | 22424601) |
| salutaridine synthase | | | | |
| salutaridinol:NADP+ 7- | SalR | salutaridinol + NADP+ ↔ | Papaver somniferum, Papaver | DQ316261, |
| oxidoreductase, also known | | salutaridine + NADPH + H+ | bracteatum, Papaver spp | EF184229 |
| as salutaridine reductase | | EC 1.1.1.248 | Chelidonium majus | (Ref PMID |
| | | | | 22424601) |
| acetyl-CoA:salutaridinol 7-O- | SalAT | acetyl-CoA + salutaridinol → CoA + | Papaver somniferum, Papaver | AF339913, |
| acetyltransferase | | 7-O- acetylsalutaridinol | bracteatum, Papaver | FJ200355, |
| | | EC 2.3.1.150 | orientale, Papaver spp | FJ200358, |
| | | | | FJ200356, |
| | | | | JQ659008 |
| Thebaine synthase | TS | 7-O-acetylsalutaridinol → thebaine + | Papaver somniferum, Papaver | AWQ63979, |
| | | acetate | bracteatum, Papaver | AWQ63980 |
| | | | orientale, | |
| | | | Papaver setigerum, | |
| | | | Papaver spp | |
| Thebaine 6-O demethylase | T6ODM | thebaine → neopinone EC | Papaver somniferium, | GQ500139.1 |
| | | 1.14.11.31 | Papaver spp. | |
| Neopinone Isomerase | NPI | neopinone → codeinone | Papaver somniferum, Papaver | XP_026424272.1 |
| | | neomorphinone → morphinone | bracteatum, Papaver | |
| | | EC 5.3.3.- | orientale, | |
| | | | Papaver setigerum, | |
| | | | Papaver rhoeas, Papaver spp | |
| Codeinone reductase | COR | codeinone → codeine EC 1.1.1.247, | Papaver somniferium, | AF108432.1 |
| | | neopinone → neopine | Papaver spp. | AF108433.1 |
| | | | | AF108434.1 |
| | | | | AF108435.1 |
| Codeine O-demethylase | CODM | codeine → morphine EC 1.14.11.32, | Papaver somniferium, | GQ500141.1 |
| | | neopine → neomorphine | Papaver spp. | |
| Morphine dehydrogenase | morA | morphine → morphinone EC | Pseudomonas putida | M94775.1 |
| | | 1.1.1.218, | | |
| | | codeinone → codeine EC 1.1.1.247 | | |
| Morphinone reductase | morB | codeinone → hydrocodone | Pseudomonas putida | U37350.1 |
| | | morphinone → hydromorphone EC | | |
| | | 1.3.1.- | | |
| NADPH:hemoprotein | ATR1, CPR | NADPH + H+ + n oxidized | Arabidopsis thaliana, E. | NM118585, |
| oxidoreductase, also known | | hemoprotein → NADP+ + | californica, P. somniferum, H. | CAB58576.1, |
| as cytochrome P450 | | n reduced hemoprotein EC 1.6.2.4 | sapiens, S. cerevisiae, P. | CAB58575.1, |
| reductase | | | bracteatum, Papaver spp., all | AAC05021.1, |
| | | | plants | AAC05022.1 many |
| | | | | others (Ref PMID |
| | | | | 19931102) |
| Cytochrome P450, family 2, | CYP2D6 | Promiscuous oxidase, can perform | Homo sapiens | BC067432 |
| subfamily D, polypeptide 6 | | (R)-reticuline + NADPH + H+ + O2 → | | |
| | | salutaridine + NADP+ + 2 H2O | | |
| | | among other reactions | | |
| | | EC 1.14.14.1 | | |
| S-adenosyl-L-methionine:(S)- | S9OMT | S-adenosyl-L-methionine + (S)- | Thalictrum flavum subsp. | AY610512, |
| scoulerine 9-O- | | scoulerine → S- adenosyl-L- | glaucum, | D29809, |
| methyltransferase | | homocysteine + (S)- | Papaver somniferum, Coptis | EU980450, |
| | | tetrahydrocolumbamine | japonica, Coptis chinensis, | JN185323 |
| | | EC 2.1.1.117 | Thalictrum spp, Coptis spp, | |
| | | | Papaver spp | |
| Tetrahydroprotoberberine- | TNMT | Stylopine → cis-N- | P. somniferum | DQ028579 |
| N- methyltransferase | | methylstylopine EC | E. califomica | EU882977 |
| | | 2.1.1.122 | P. bra cteatum | EU882994 |
| | | Canadine → N-methylcanadine | A. mexicana | HQ116698 |
| Cheilanthifoline synthase | CFS | Cheilanthifoline → | P. somniferum | GU325749 |
| | | stylopine | E. califomica | AB434654 |
| | | EC 1.14.21.1 | P. bracteatum | EF451152 |
| | | | A. mexicana | |
| Stylopine synthase | STS | Stylopine → cis-N- | P. somniferum | GU325750 |
| | | methylstylopine | E. californica | AB126257 |
| | | EC 2.1.1.122 | P. bracteatum | EF451151 |
| | | | A. mexicana | |
| Cis-N-methylstylopine 14- | MSH | Cis-N-methylstylopine → | P. somniferum | KC154003 |
| hydroxylase | | protopine | E. califomica | |
| | | EC 1.14.13.37 | P. bracteatum | |
| | | | A. mexicana | |
| Protopine-6-hydroxylase | P6H | Protopine → 6- | E. califomica | AB598834 |
| | | hydroxyprotopine | P. somniferum | AGC92397 |
| | | EC 1.14.13.55 | P. bracteatum | |
| | | | A. mexicana | |
| Dihydrobenzophenanthridine | DBOX | Dihydrosanguinarine → sanguinarine | P. somniferum | AGL44336, |
| oxidase | | EC 1.5.3.12 | E. califomica | AGL44335, |
| | | | P. bracteatum | AGL44334 |
| | | | A. mexicana | |
| (S)- | STOX | (S)-tetrahydroberberine + 2 O₂ → | Berberis wilsonae, Coptis | HQ116697, |
| tetrahydroprotoberberine | | berberine + 2 H₂O₂ | japonica, Berberis spp, Coptis | AB564543 |
| oxidase | | EC 1.3.3.8 | spp | |
| (S)-tetrahydrocolumbamine, | CAS | (S)-tetrahydrocolumbamine + NADPH | Thalictrum flavum subsp. | AY610513, |
| NADPH:oxygen | | + H+ + O2 → (S)-canadine + NADP+ + 2 | glaucum, Coptis japonica, | AB026122, |
| oxidoreductase | | H2O | Thalictrum spp, Coptis spp | AB374407, |
| (methylenedioxy-bridge- | | EC 1.14.21.5 | | AB374408 |
| forming), also known as (S)- | | | | |
| canadine synthase | | | | |
| (S)-reticuline:oxygen | BBE | (S)-reticuline + O2 → (S)-scoulerine + | Papaver somniferum, | AF025430, |
| oxidoreductase (methylene- | | H2O2 | Argemone mexicana, | EU881889, |
| bridge-forming), also known | | EC 1.21.3.3 | Eschscholzia califomica, | EU881890, |
| as berberine bridge enzyme | | | Berberis stolonifera, Thalictrum | S65550 |
| | | | flavum subsp. glaucum, Coptis | AF005655, |
| | | | japonica, Papaver spp, | AF049347, |
| | | | Eschscholzia spp, Berberis spp, | AY610511, |
| | | | Thalictrum spp | AB747097 |
| Berbamunine synthase | CYP80A1 | (S)-N-methylcoclaurine + (R)-N- | Berberis stolonifera, Capsicum | AAC48987, |
| | | methylcoclaurine −> berbamunine | chinense, Quercus suber | PHU28278, |
| | | EC 1.14.21.3 | | POF05239 |
| | | 1-benzylisoquinoline alkaloid + 1- | | |
| | | benzylisoquinoline alkaloid −> bis- | | |
| | | benzylisoquinoline alkaloid | | |
| Protopine O-dealkylase | PODA | O,O-demethylenation of canadine, | P. somniferum, | GQ500140.1 |
| | | stylopine and berberine | Papaver spp. | |
| Reticuline N- | RNMT | reticuline → tembetarine | Papaver somniferum, Papaver | KX369612.1 |
| methyltransferase | | | spp. | |
| Papaverine 7-O-demethylase | P7OMT | papaverine → pacodine | Papaver somniferum, Papaver | KT159979.1 |
| | | | spp. | |
| 3-O-demethylase | 3ODM | oxycodone → oxymorphone | Papaver somniferum, Papaver | |
| | | hydrocodone → hydromorphone | bracteatum, Papaver rhoeas, | |
| | | dihydrocodeine → dihydromorphine | Papaver spp. | |
| | | 14-hydroxycodeine → 14- | | |
| | | hydroxymorphine | | |
| | | codeinone → morphinone | | |
| | | 14-hydroxycodeinone → 14- | | |
| | | hydroxymorphinone | | |
| N-demethylase (in some | NDM | Codeine → Norcodeine | Bacillus megaterium, Homo | |
| cases the NDM activity is | | Morphine → Normorphine | sapiens, Papaver somniferum, | |
| encoded in BM3 or an | | Oxycodone → Noroxycodone | Papaver spp., Chelidonium | |
| engineered variant of BM3) | | Oxymorphone → Noroxymorphone | majus, Stylophorum | |
| | | Thebaine → Northebaine | diphyllum, Nigella sativa, | |
| | | Oripavine → Nororipavine | Hydrastis canadensis, | |
| | | Hydrocodone → Norhydrocodone | Glaucium flavum, | |
| | | Hydromorphone → Norhydromorphone | Eschscholzia califomica, | |
| | | Dihydrocodeine → Nordihydrocodeine | Menispermum canadense, | |
| | | Dihydromorphine → Nordihydromorphine | Papaver bracteatum | |
| | | 14-hydroxycodeine → Nor-14- | | |
| | | hydroxycodeine | | |
| | | 14-hydroxymorphine → Nor-14- | | |
| | | hydroxymorphine | | |
| | | Codeinone → Norcodeinone | | |
| | | Morphinone → Normorphinone | | |
| | | 14-hydroxycodeinone → Nor-14- | | |
| | | [symbol] | | |
| N-methyltransferase | NMT | Norcodeine → codeine | Papaver spp., Chelidonium | |
| | | Normorphine → morphine | majus, Thalictrum flavum, | |
| | | Noroxycodone → oxycodone | Coptis japonica, Papaver | |
| | | Noroxymorphone → noroxymorphone | somniferum, Eschscholzia | |
| | | Northebaine → thebaine | californica, Papaver | |
| | | Nororipavine → oripavine | bracteatum, Argenome | |
| | | Norhydrocodone → hydrocodone | mexicana, Glaucium flavum, | |
| | | Norhydromorphone | San guinaria canadensis, | |
| | | Hydromorphone | Corydalis chelanthifolia, | |
| | | Nordihydrocodeine → Dihydrocodeine | Nigella sativa, Jeffersonia | |
| | | Nordihydromorphine → | diphylla, Berberis thunbergii, | |
| | | Dihydromorphine | Mahonia aquifolium, | |
| | | Nor-14-hydroxycodeine → 14- | Menispermum canadense, | |
| | | hydroxycodeine | Tinospora cordifolia, | |
| | | Nor-14-hydroxymorphine → 14- | Cissampelos mucronata, | |
| | | hydroxymorphine | Cocculus trilobus | |
| | | Norcodeineone → Codeineone | | |
| | | Normorphinone → Morphinone | | |
| | | Nor-14-hydroxy-codeinone → 14- | | |
| | | [symbol] | | |
| N-allyltransferase | NAT | Norcodeine → N-allyl-norcodeine | Papaver spp., Chelidonium | |
| | | Normorphine → N-allyl-normorphine | majus, Thalictrum flavum, | |
| | | Noroxycodone → N-allyl-noroxycodone | Coptis japonica, Papaver | |
| | | Noroxymorphone → N-allyl- | somniferum, Eschscholzia | |
| | | nornoroxymorphone | californica, Papaver | |
| | | Northebaine → N-allyl-northebaine | bracteatum, Argenome | |
| | | Nororipavine → N-allyl-nororipavine | mexicana, Glaucium flavum, | |
| | | Norhydrocodone → N-allyl- | Sanguinaria canadensis, | |
| | | norhydrocodone | Corydalis chelanthifolia, | |
| | | Norhydromorphone → N-allyl- | Nigella sativa, Jeffersonia | |
| | | norhydromorphone | diphylla, Berberis thunbergii, | |
| | | Nordihydrocodeine → N-allyl- | Mahonia aquifolium, | |
| | | nordihydrocodeine | Menispermum canadense, | |
| | | Nordihydromorphine → N-allyl- | Tinospora cordifolia, | |
| | | nordihydromorphine | Cissampelos mucronata, | |
| | | Nor-14-hydroxycodeine → N-allyl-nor- | Cocculus trilobus | |
| | | 14-hydroxycodeine | | |
| | | Nor-14-hydroxymorphine → N-allyl- | | |
| | | nor-14-hydroxymorphine | | |
| | | Norcodeineone → N-allyl-norcodeineone | | |
| | | Normorphinone → N-allyl-normorphinone | | |
| | | Nor-14-hydroxy-codeinone → N-allyl- | | |
| | | nor-14-hydroxycodeinone | | |
| N-cyclopropylmethyltransferase | CPMT | Norcodeine → N(cyclopropylmethyl)norcodeine | Papaver spp., Chelidonium | |
| | | Normorphine → N(cyclopropylmethyl) | majus, Thalictrum flavum, | |
| | | normorphine | Coptis japonica, Papaver | |
| | | Noroxycodone → N(cyclopropylmethyl) | somniferum, Eschscholzia | |
| | | noroxycodone | califomica, Papaver | |
| | | Noroxymorphone → N(cyclopropylmethyl) | bracteatum, Argenome | |
| | | nornoroxymorphone | mexicana, Glaucium flavum, | |
| | | Northebaine → N(cyclopropylmethyl) | San guinaria canadensis, | |
| | | northebaine | Corydalis chelanthifolia, | |
| | | Nororipavine → N(cyclopropylmethyl) | Nigella sativa, Jeffersonia | |
| | | nororipavine | diphylla, Berberis thunbergii, | |
| | | Norhydrocodone → N(cyclopropylmethyl) | Mahonia aquifolium, | |
| | | norhydrocodone | Menispermum canadense, | |
| | | Norhydromorphone → | Tinospora cordifolia, | |
| | | N(cyclopropylmethyl)norhydromorphone | Cissampelos mucronata, | |
| | | Nordihydrocodeine → | Cocculus trilobus | |
| | | N(cyclopropylmethyl)nordihydrocodeine | | |
| | | Nordihydromorphine → | | |
| | | N(cyclopropylmethyl)nordihydromorphine | | |
| | | Nor-14-hydroxycodeine → | | |
| | | N(cyclopropylmethyl)nor-14- | | |
| | | hydroxycodeine | | |
| | | Nor-14-hydroxymorphine → | | |
| | | N(cyclopropylmethyl)nor-14- | | |
| | | hydroxymorphine | | |
| | | Norcodeineone → | | |
| | | N(cyclopropylmethyl)norcodeineone | | |
| | | Normorphinone → | | |
| | | N(cyclopropylmethyl)normorphinone | | |
| | | Nor-14-hydroxy-codeinone | | |
| | | N(cyclopropylmethyl)nor-14- | | |
| | | hydroxycodeinone | | |
| | | Nor-14-hydroxy-morphinone → | | |
| | | N(cyclopropylmethyl)nor-14- | | |
| | | hydroxymorphinone | | |

[symbol]

indicates data missing or illegible when filed

TABLE 6
O-demethylase candidate enzymes

| Name | Sequence |
|---|---|
| T6ODM | MEKAKLMKLGNGMEIPSVQELAKLTLAEIPSRYVCANENLLLPMGASVINDHETIPVIDIENLLSPEPIIGKLELD |
| | RLHFACKEWGFFQVVNHGVDASLVDSVKSEIQGFFNLSMDEKTKYEQEDGDVEGFGQGFIESEDQTLDWADIFMMF |
| | TLPLHLRKPHLFSKLPVPLRETIESYSSEMKKLSMVLFNKMEKALQVQAAEIKGMSEVFIDGTQAMRMNYYPPCPQPN |
| | LAIGLTSHSDFGGLTILLQINEVEGLQIKREGTWISVKPLPNAFVVNVGDILEIMTNGIYHSVDHRAVVNSTNERLSIATF |
| | HDPSLESVIGPISSLITPETPALFKSGSTYGDLVEECKTRKLDGKSFLDSMRI |
| CODM | METPILIKLGNGLSIPSVQELAKLTLAEIPSRYTCTGESPLNNIGASVTDDETVPVIDLQNLLSPEPVVGKLELDKLHSAC |
| | KEWGFFQLVNHGVDALLMDNIKSEIKGFFNLPMNEKTKYGQQDGDFEGFGQPYIESEDQRLDWTEVFSMLSLPLHLR |
| | KPHLFPELPLPFRETLESYLSKMKKLSTVVFEMLEKSLQLVEIKGMTDLFEDGLQTMRMNYYPPCPRPELVLGLTSHS |
| | DFSGLTILLQLNEVEGLQIRKEERWISIKPLPDAFIVNVGDILEIMTNGIYRSVEHRAVVNSTKERLSIATFHDSKLESEIG |
| | PISSLVTPETPALFKRGRYEDILKENLSRKLDGKSFLDYMRM |
| PsP7ODM | MEKAKLMKLGNGLSIPSVQELAELTFAEVPSRYVCTNDENLLLMTMGASEIDDETVPVIDLQNLLSPEPAIGKSELDW |
| | LHYSCKEWGFFQLVNHGVDALLVDHVKSEIHSFFNLPLNEKTKYGQRDGDVEGFGQAFLVSENQKLDWADMFFINTL |
| | PLHLRKPHLFPNLPLPLRETIESYSSEMKKLSMVLFEMMGKAIEVIDIKEAITEMFEDGMQSMRMNYYPPCPQPERVI |
| | GITPHSDFDGLTILLQLNEVEGLQIRKEDKWISIKPLPDAFIVNVGDIWEIMTNGVHRSVDHRGVINSTKERLSIATFHS |
| | PKLELEIGPISSLIRPETPAVFKSAGRFEDLLKEGLSRKLDGKSFLDCMRM |
| PsoDIOX1 | MEKAKLMKLGNGMEIPSVQELAKLTLAEIPSRYVCANENLLLPMGASVINDHETIPVIDIENLLSPEPIIGKLELDRLHF |
| | ACKEWGFFQVVNHGVDASLVDSVKSEIQGFFNLSMDEKTKYEQEDGDVEGFGQGFIESEDQTLDWADIFMMFTLPLH |
| | LRKPHLFSKLPVPLRETIESYSSEMKKLSMVLFNKMEKALQVQAAEIKGMSEVFIDGTQAMRMNYYPPCPQPNLAIGL |
| | TSHSDFGGLTILLQINEVEGLQIKREGTWISVKPLPNAFVVNVGDILEIMTNGIYHSVD |
| PsoDIOX2 | METAKLMKLGNGMSIPSVQELAKLTLAEIPSRYICTVENLQLPVGASVIDDHETVPVIDIENLISSEPVTEKLELDRLHS |
| | ACKEWGFFQVVNHGVDTSLVDNVKSDIQGFFNLSMNEKIKYGQKDGDVEGFGQAFVASEDQTLDWADIFMILTLPLH |
| | LRKPHLFSKLPLPLRETIESYSSEMKKLSMVLFEKMEKALQVQAVEIKEISEVFKDMTQVMRMNYYPPCPQPELAIGLT |
| | PHSDFGGLTILLQLNEVEGLQIKNEGRWISVKPLPNAFVVNVGDVLEIMTNGMYRSVDHRAVVNSTKERLSIATFHDP |
| | NLESEIGPISSLITPNTPALFRSGSTYGELVEEFHSRKLDGKSFLDSMRM |
| PbrDIOX2 | METPKSIKLGGSLLVPSVQELAQQSFAEVPARYVRDDLEPLTDLSGVSMIDQTIPVIDLQKLQSPVPIIRELESEKLHSAC |
| | KEWGFFQVVNHGVDILLVEKTKSEIKDFFNLPMDEKKKFWQEEGDIQGFGQAFVQSEDQKLDWADIFLMVTLPRHT |
| | RNPRLFPKLPLPLRNTMDSYSSKLSKLASTLIEMMGKALHMETSVLAELFEDGRQTMRINYYPPCPQPKDVIGLTPHS |
| | DGGGLTILLQLNEVDGLQIRKEKIWIPIKPLPNAFVVNIGNILEIMTNGIYRSVEHRATIHSTKERLSVAAFHNPKVGVEI |
| | GPIVSMITPESPALFRTIEYDDYGKKYFSRKLDGKSSLDFMRIGEGDEENKAT |
| PbrDIOX3 | METPKLIKLGGSLLVPSVLELTKQSPAEVPARYIRNDLEPMTDLSSASLTDQTIPVIDLQNLLSPEPELELEKLHSGCKE |
| | WGFFQVMNHGVDILLVEKVKSEIQGFFNLPIDEKNKFWQEEGDLEGYGKAFVHSEDEKLDWADMFFILTQPQYMRK |
| | PRVFPKLPLRLRETIESYSLELSKLGLTLLDLMGKALQIETGVMSELFEDGRQTMRMNYYPPCPQPEHVIGLTPHSDGG |
| | ALTILLQLNQVDGLQIRKEEIWVPIKPLPNAFVVNIGDILEIMSNGVYRSVEHRATINSSKERLSVAIFQSPKHGTEIGPIL |
| | SMITPEAPALFKTIPYEDYLRKFFSRKLGGKSFVDSMRIGESDEDNNTA |
| PbrDIOX4 | METQKQENFGASLSVPNVQELAKQSPEQVPDRYIRSDQDSSTNISCPSMTDQIPVIDLQSLLSPDPIIGELELERLHSAC |
| | KEWGFFQVVNHGVDNLLVEKVKSEIQGFFNLPMDEKKKFWQEEGDFEGFGQAFVFSEDQKLDWGDVFFILTQPQH |
| | MRKPRLFPKLPLPFRKTIESYSLETNKLSMTLLELMEKALKIETGVMTELFEGGIQRMRMTYYPPCPQPKHVIGLTPHS |
| | DPDALTILLQLNEVDGLQIRKEKIWVPIKPLSNAFVVNIGDILEIMSNGIYRSVEHRATVNSTKERLSVATFHSPRKDTE |
| | IGPILITPETPALFRTSGFEDYFRKFFAHKLNGKSFLSSIRIGETDEGNNAT |
| PbrDIOX5 | MEAPKLIMLGGSLFVPSVQELAKQSLAEVPVRYVRDDQDTLGNNINITPMSMIDQSIPVIDLEKLLSPEPIVGELELERL |
| | HSACKEWGFFQVVNHGVDSLLVEKVKSEIEGFFKLPMDEKTKFWQEEGDIEGFGQVFVHSQDQKLDWGDMFLMQT |
| | LPRHTRKPRLFPNLPLPLRQTIESYSSELSKLVLTLVDLMGKALQMESGVLTELFENGIQRMRMNYYPPCPQPEQVIGL |
| | TPHSDVGGLTILLQLNEVDGLQIKKDKVWVPIKPLANAFVVNVGDALEIMSNGIYRSVEHRATINSTKERLSIATFHNP |
| | RADREIGPIPSMISPETPALFKTTGYEEYFKKFFSRKLEGKSFLDSLRIREGDEHCGRLDVKGPCN |
| PbrDIOX6 | MEIPNPIKIGSSLLVPSVQELAKQSFAEVPARYIRNDVDPLITKLSDVSLIDQTVPVIDLQKLLSPEPIV |
| | GELELERLHSACKEWGFFQVVNHGVDNLLVEKVKSEIQGFFNLPMEEKKKFWQEEGDFEGFGQMFVQSEE |
| | QKLDWGDMFFILTQPQHMRKPRLFSKLPLPLRETIESYSLELIKLGLTIIKLMEKALQIDAGVMAELFED |
| | GIHTMRMNYYPPCPQPEHVIGLTPHSDGGGLTILLQLNEVDGLQIRRENIWVPIKPLPNAFVVNIGDILE |
| | ILSNGIYRSVEHRSTVNATKERLSVATFQNPKQESVIGPNMITPERPALFRKIVYKDYMKKLFSRKLDGK |
| | SFLDSLRIGEGDERP |
| PbrDIOX8 | METLKTVKPGGSLFIPNGQELAKQSLEEVYVGNDQDTMLLIGQTIPVIDLQKLLSPEPITGDMELDKLHS |
| | ACKEWGFFQVVNHGVDILLVEKVKSEVHDFFNIPMDEKKPFWQEEGDLEGFGQVFITSEDQQLDWGDMFF |
| | MVTLPKHMRKPRLFLKLPLPLRETIESYSLKLSKLGVTLVELMGKALQMEDRIMSELFDDGRQTMRMNYY |
| | PPCPQPEQVIGLTPHSDPGGLTILLELNEVNGLIRKENIWVPIIPLPNAFIVNIGDILEIMSNGIYHSVE |
| | HRATINSTKERLSVAMFNSPKVDTEIGPIHSMITPETPALFRTIGYDEYLKIFFSRKLDGKSLLESMKI |
| PbrDIOX10 | MEAPKLIMLGGSLFVPSVQELAKQSLAEVPVRYVRDDQDTLGNNINITPMSMIDQSIPVIDLEKLLSPEP |
| | IVGELELERLHSACKEWGFFQVVNHGVDSLLVEKVKSEIEGFFELPVDEKKKFWQEEGDIEGFGQIFVHS |
| | EDQKLDWADMFYMLTLPPNMRKPRLFPNLPLPLRQTIDSYSSELSKLVLTLVDLMGKALQMESGVLTELF |
| | ENGIQRMRMNYYPPCPQPEQVIGLTPHSDVGGLTILLQLNEVDGLQIKKDKIWVPIKPLRNAFVVNVGDA |
| | LEIMSNGIYRSVEHRATINSTKERLSIATFHNPRADREIGPIPSMISPETPALFKTTGYEEYFKKFFSRK |
| | LEGKSFLDSLRIGEGDEHCGRLXVKGXCN |
| PbrDIOX11 | METPKLMKLGGSLFVPSVQELAKQSLAEVPARYVRDDRDMVGNIINVTPMSMIDQSIPVIDLEKLLSPDL |
| | IVGELELERLHSACKEWGFFQVVNHGVDSLLVEKVKSEIEGFFELPMDEKKKFWQEEGDAEGFAQFFVQS |
| | EDQKLDYSGDMFFMLNLPQHMRKPRLFLKLPLPLRETIESYSLKLSKLGVTLVELMGKALQMEDRIMSEL |
| | FDDGRQTMRMNYYPPCPQPEQVIGLTPHSDPGGLTILLELNEVNGLIRKENIWVPIIPLPNAFIVNIGDI |
| | LEIMSNGIYHSVEHRATINSTKERLSVAMENSPKVDTEIGPIHSMITPETPALFRTIGYDEYLKIFFSRK |
| | LDGKSLLESMKI |
| PbrDIOX13 | METPKLRDEGSFLPVPSVQELAKQVLTEIPPRYIRTDLEALNKLSCASNTDQTVPIIDMQCLLSAEPEME |
| | LEKLHSACKEWGFERVVNHGVDNLESVKSEIESELNLPVNAKNKYGQKQGDDQGFGSREVLSEEQKLDWG |
| | DFFYMVTRPLYLRKPHLEPELPLPLRETIESYSSEVSKLAMALFEMMGKALKIETGVMTEIFEGGMQAMR |
| | MNYYPPCPRPDLVIGLNAHSDEGGLTILLQLNEVEGLEIRNKGEWVSVKPLANAFVVNVGDVMEILTNGI |
| | YHSVEHRATINSSKERLSVATEHYPKLETGIGPLPCMITPKTPALFGRIERYELLLRKYYARKLNGKSTL |
| | DCMRIGNGFEDDNTA |
| PbrDIOX18 | MEAPKLIMLGGSLEVPSVQELAKQSLAEVPARYVRDDQDTLGNNINITPMSMIDQSIPVIDLEKLLSPEP |
| | IVGELELERLHSACKEWGFFQVVNHGVDSLLVEKVKSEIEGFFELPVDEKKKEWQEEGDIEGFGQIFVHS |
| | EDQKLDWADMFYMLTLPPNMRKPRLFPNLPLPLRQTIDSYSSELSKLVLTLVDLMGKALQMESGVLTELF |
| | ENGIQRMRMNYYPPCPQPEQVIGLTPHSEVGGLTILLQLNEVDGLQIRKEKIWVPIKPLSNAFIVNIGDI |
| | LEIMSNGIYRSVEHRATVNSTKERLSVATEHSPRKDTEIGPILITPETPALFRTSGFEDYFRKFFAHKLN |
| | GKSFLSSIRIGETDEGNNAT |
| PbrDIOX19 | MSMIDQSIPVIDLEKLLSPEPIVGELELERLHSACKEWGFFQVVNHGVDSLLVEKVKSEIEGFFELPVDE |
| | KKKEWQEEGDIEGFGQIFVHSEDQKLDWADMFYMLTLPPNMRKPRLFPNLPLPLRQTIDSYSSELSKLVL |
| | TLVDLMGKALQMESGVLTELFENGIQRMRMNYYPPCPQPEQVIGLTPHSDVGGLTILLQLNEVDGLQIRK |
| | EKIWVPIKPLSNAFIVNIGDILEIMSNGIYHSVEHRATINSTKERLSVAMENSPKVDTEIGPIHSMITPE |
| | TPALFRTIGYDEYLKIFFSRKLDGKSLLESMKI |
| PbrDIOX21 | METPKLVKSSGSSLELSTSVQELAKQSLPEVPARYIRTNLEPLSNVSGDSQSVPVIDLQKLLSSEPIIGE |
| | LELDKLHSACKEWGFFQVVNHGVDNLVMEKIKTEIQGFENLSLDEKQKFWKKEGDAEGFGQNFIESEDQK |
| | LDWGDTEGMFTLPIHMRNPRLFPELPLPLRETIESYSLDVRKLALALIGLMEKALKIKTSAMSELFEDGG |
| | QAMRMNYYPPCPQPEHVIGLTPHSDAGGLTILLQLNEVDGLQIKKDKIWVPIKPLPNAFVVNIGDILEIM |
| | TNGIYRSVEHRATINSSKERLSVAAFHSPKGDTLIGPMVSLITPETPALFRTIGYQDYMKKFMSRKLDGK |
| | SLVNSMRIGEGDEDK |
| PbrDIOX- | METPTLMKLGNGLSVPSVQELAKATLAEIPSRYICTDENLLTMGASTTDNETVPVIDLQNLLSPEPVIGMLELDRLHSA |
| ZSNV- | CKEWGFFQLVNHGVDALLVDNEVQGFENLPMDEKTKYGQKDGDDEGFGQFFVISEDQKLDWADVEYMSTLPLHSRK |
| 2004018 | PHLEPELPLPLRETMESYSSEMKKLSMVLEDMMGKALQVVEIKGITELFEDGAQQIRMNYYPPCPQPELVEGLTSHSD |
| | FDGLTILLQLGEVEGLQIKKEERWISIKPLPDAFIVNVGDILEIMTNGIYRSVDHRAVVNSIKERLTIATEHDPRLEAEIG |
| | PISSLITPETPALFKRGVFEDLLKEMFLRKLDGKSFLDCMRM |
| PrhDIOX- | GNGLSVPSVQELAKQTLAEIPSRYICTDENPLITGASVVDDETVPVINLQNLLSPEPVIGKLELDKLHSACKEWGFFQVV |
| MVTX- | NHGVNDSLVDSVKSEIEGFENLPANEKLKYGQKDGDVEGFGQHFVVSEDQKLDWADVEYMVTLPVRLRKPHLEPELP |
| 2001522 | LPLRDTLDSYSSELNKLSMVLLEMMEKALKLVECKGITDFFEDGFQQMRMNYYPPCPRPELVTGLTSHSDEGGLTILL |
| | QLNDVEGLQIKKEERWISIKPLPNAFIVNIGDVLEIMSNGIYRSVDHRAVINSTKVRMSVATEHDPRLEAVIGPISSLITP |
| | ETPALFKRGVFEDLLKEMFLRKLDGKSFLDCMRI |
| PseDIOX- | LMKLANGMSVPIVQELAKLTVGEIPSRYICTDGNLLTMGASVIDYETVPVIDLQNLQSREPVIEKLELDRLHSACKEWG |
| JSVC- | FFQLLNHGVDASLMDNVRSEIRGFENLPISDKMKYGQKDGDEEGFGQHFIVSEDQKLDWVDAFMMFTLPLHSRNPRL |
| 2005842 | TPEFPQPLRETVESYSSEMKKLSVLLFELMEKALQVKGITEMFEDGLQSIRMNYYPPCPRPELAIGLTSHSDEDGLTILL |
| | QLNEVEGLQIKKEERWISIKPLPNAFIVNVGDVLEVMTNGIYRSVDHRAVVNSTKERLSIATEHDPELESEIGPIASLITP |
| | ETPALFKRGREKDLLKENLSTKLDGKSELDCIRM |
| CYP2D6 | MGLEALVPLAVIVAIELLLVDLMHRRQRWAARYSPGPLPLPGLGNLLHVDFQNTPYCEDQLRRREGDVESLQLAWTP |
| | VVVLNGLAAVREALVTHGEDTADRPPVPITQILGEGPRSQGVFLARYGPAWREQRRESVSTLRNLGLGKKSLEQWVT |
| | EEAACLCAAFANHSGRPFRPNGLLDKAVSNVIASLTCGRRFEYDDPRFLRLLDLAQEGLKEESGFLREVLNAVPVLLHI |
| | PALAGKVLREQKAFLTQLDELLTEHRMTWDPAQPPRDLTEAFLAEMEKAKGNPESSENDENLRIVVADLFSAGMVT |
| | TSTTLAWGLLLMILHPDVQRRVQQEIDDVIGQVRRPEMGDQAHMPYTTAVIHEVQRFGDIVPLGVTHMTSRDIEVQG |
| | FRIPKGTTLITNLSSVLKDEAVWEKPERFHPEHELDAQGHFVKPEAFLPFSAGRRACLGEPLARMELFLEFTSLLQHFS |
| | FSVPTGQPRPSHHGVFAFLVTPSPYELCAVPR |

TABLE 7
N-demethylase candidate enzymes

| Name | Sequence |
|---|---|
| BM3 | MTIKEMPQPKTFGELKNLPLLNTDKPVQALMKIADELGEIFKFEAPGRVTRYLSSQRLIKEACDESRFDKNLSQAAKF |
| | ARDFAGDGLVTSWTHEKNWKKAHNILLPSFSQQAMKGYHAMMVDIAVQLVQKWERLNADEHIEVSEDMTRLTLDT |
| | IGLCGFNYRFNSFYRDQPHPFIISMVRAADEVMNKLQRANPDDPAYDENKRQFQEDIKVMNDLVDKIIADRKARGEQ |
| | SDDLLTQMLNGKDPETGEPLDDGNIRYQIITFLIAGHETTSGLLSFALYFLVKNPHVLQKVAEEAARVLVDPVPSYKQV |
| | KQLKYVGMVLNEALRLWPTAPAFSLYAKEDTVLGGEYPLEKGDEVMVLIPQLHRDKTVWGDDVEEFRPERFENPSAI |
| | PQHAFKPFGNGQRACIGQQFALHEATLVLGMMLKHFDFEDHTNYELDIKETLTLKPKGFVVKAKSKKIPLGGIPSPST |
| | EQSAKKVRKKAENAHNTPLLVLYGSNMGTAEGTARDLADIAMSKGFAPQVATLDSHAGNLPREGAVLIVTASYNGHP |
| | PDNAKQFVDWLDQASADEVKGVRYSVFGCGDKNWATTYQKVPAFIDETLAAKGAENIADRGEADASDDFEGTYEE |
| | WREHMWSDVAAYFNLDIENSEDNKSTLSLQFVDSAADMPLAKMHGAFSTNVVASKELQQPGSARSTRHLEIELPKE |
| | ASYQEGDHLGVIPRNYEGIVNRVTARFGLDASQQIRLEAEEEKLAHLPLAKTVSVEELLQYVELQDPVTRTQLRAMAA |
| | KTVCPPHKVELEALLEKQAYKEQVLAKRLTMLELLEKYPACEMKFSEFIALLPSIRPRYYSISSSPRVDEKQASITVSVVS |
| | GEAWSGYGEYKGIASNYLAELQEGDTITCFISTPQSEFTLPKDPETPLIMVGPGTGVAPFRGFVQARKQLKEQGQSLGE |
| | AHLYFGCRSPHEDYLYQEELENAQSEGIITLHTAFSRMPNQPKTYVQHVMEQDGKKLIELLDQGAHFYICGDGSQMAP |
| | AVEATLMKSYADVHQVSEADARLWLQQLEEKGRYAKDVWAG |
| CYP3A4-1 | MALIPDLAMETWLLLAVSLVLLYLYGTHSHGLFKKLGIPGPTPLPFLGNILSYHKGFCMFDMECHKKYGKVWGFYDG |
| | QQPVLAITDPDMIKTVLVKECYSVFTNRRPFGPVGFMKSAISIAEDEEWKRLRSLLSPTFTSGKLKEMVPIIAQYGDVL |
| | VRNLRREAETGKPVTLKDVFGAYSMDVITSTSFGVNIDSLNNPQDPFVENTKKLLRFDFLDPFFLSITVFPFLIPILEVL |
| | NICVFPREVTNFLRKSVKRMKESRLEDTQKHRVDFLQLMIDSQNSKETESHKALSDLELVAQSIIFIFAGYETTSSVLSFI |
| | MYELATHPDVQQKLQEEIDAVLPNKAPPTYDTVLQMEYLDMVVNETLRLFPIAMRLERVCKKDVEINGMFIPKGVVV |
| | MIPSYALHRDPKYWTEPEKFLPERFSKKNKDNIDPYIYTPFGSGPRNCIGMRFALMNMKLALIRVLQNFSFKPCKETQI |
| | PLKLSLGGLLQPEKPVVLKVESRDGTVSGA |
| CYP3A4-2 | MALIPDLAMETWLLLAVSLVLLYLYGTHSHGLFKKLGIPGPTPLPFLGNILSYHKGFCMFDMECHKKYGKVWGFYDG |
| | QQPVLAITDPDMIKTVLVKECYSVFTNRRPFGPVGFMKSAISIAEDEEWKRLRSLLSPTFTSGKLKEMVPIIAQYGDVL |
| | VRNLRREAETGKPVTLKDVFGAYSMDVITSTSFGVNIDSLNNPQDPFVENTKKLLRFDFLDPFFLSIIFPFLIPILEVLNI |
| | CVFPREVTNFLRKSVKRMKESRLEDTQKHRVDFLQLMIDSQNSKETESHKALSDLELVAQSIIFIFAGYETTSSVLSFIM |
| | YELATHPDVQQKLQEEIDAVLPNKAPPTYDTVLQMEYLDMVVNETLRLFPIAMRLERVCKKDVEINGMFIPKGVVVM |
| | IPSYALHRDPKYWTEPEKFLPERFSKKNKDNIDPYIYTPFGSGPRNCIGMRFALMNMKLALIRVLQNFSFKPCKETQIP |
| | LKLSLGGLLQPEKPVVLKVESRDGTVSGA |
| McaCYP82-4 | MIMMFIDYYSSWLPQTLLLQSILLAVSLVIFINLFLTRRRSYSSKSHTNIIHPPKAAGALPVIGHLYTLF |
| | RGLSAGVPLYRQLDAMADRYGPAFIIHLGVYPTLVVTCRELAKECFTTNDQTFATRPSTCAGKYIGYNYA |
| | FFGFAPYGPYWREARKIATVELLSNYRLDSLRHVREAEVGRNVDELYALHASSSTNKQNMMKIDMKQWFD |
| | QVTLNVILMMVVGKRCVTTGGNEEEVRVVKVLHEFFKHLGTLSVSDVVPYVEWMDLDGNIGRMKSTAKEL |
| | DCILGRWLEEHRRERRSDFMDAMLAMVEGIKIPYYDSDTVIKAICLNLLNAGSDTLGITMTWALSLLLNN |
| | RHVLKKVKDELDVHVGKNRQVEELDVKNLVYLHAVVKETLRLFPPAPLGVPHEAMEDCVVGGFHVAKGTR |
| | LVVNVWKLHRDPSVWSDPLAFKPERFLDNNTVDVRGQHFQLLPFGSGRRGCPGITFALQVAHLTLARLLH |
| | GFEWDTPDGAPVDMSEVSVLTTAKKNPVEVLFTPRLPAEVYTQN |
| NsaCYP82-4 | MLSIHDSTMVFLQLQAICGIFGFIFIITWWTRWKSSNKMKAPEVAGAWPVIGHLHLLGGGRPLYQLLGDM |
| | SDKYGPAFTLRMGIQKALVVSSWEVAKECLTTNDRALATRPSSAGGKYMGYNNALIPFSPYGPYWRDMRK |
| | IATLELLSNHRLEELKHVREMEINTCISDMYKLCQVEDGVEIKPISVDLSQWFADLTFNVVVMMITGKRY |
| | IGSTDAGDMNEIRHFQAALVKFMRLLRISLLVDVFPVLQWINYGGFKGVMKSTARDIDSVLENWLQEHQR |
| | KRLSPDFNGNHDFIDVMISTLEGTEFSDYDHNTIIKAISMAMVVGGTDTTTTTLIWAISLLLNNPNAMKK |
| | VQEELEIHVGKERNVDGSDIQHLVYLQAVVKETLRLYPPVPLSVMHQAMEDCVIGSYNIQAGTRVLFNLW |
| | KLHRDSSVWSDPLEFRPERFLTSHVDVDVRGQHFELIPFGSGRRSCPGISFALQVIHLTIARLFHGFNLT |
| | TPGNSSVDMSEISGATLSKVTPLEVLVTPRLSSKLYN |
| HcaCYP82-10 | MDSLLQLQIIGALAALIFTYKLLKVICRSPMTDGMEAPEPPGAWPIIGHLHLLGGQDPIARTLGVMTDKY |
| | GPILKLRLGVHTGLVVSNWELAKECFTTNDRVLASRPMGAAGKYLGYNYAIFGLAPHGPYWSEVRKIVLR |
| | ELLSNQSLEKLKHVRISEINTCLKNLFSLNNGNTPIKVDMKQWFERPMFNVVTMMIAGKRYFSMENDNEA |
| | MNFRKVATEFMYLTGVFVVSDALPYLEWLDLQGHVSAMKRTAKELDIHVGKWLEEHRRAKLLGETKNEDD |
| | FVDVLLTILPEDLKDNQTYIHDRDTIIKATALALFLAASDTTAITLTWALSLILNNPDVLKRAQDELDKH |
| | VGKEKLVKESDIINLVYLQAIIKETLRLYPAAPLLLPHEAMEDCTVGGYHVPKGTRIFVNIWKLQRDPRV |
| | WFDPNEFRPERFLTTHANVDFKGQHFEYIPFSSGRRVCPGITFSTQIMHLTLAHLLHEFNIVTPTKSNAG |
| | VDMTESLGITMPKATPLEVLLTPRLPSNLYNQYRD |
| EcaCYP82-7 | MNLLIFFQFLLQFQVLVGLSVLLAFSYYLWVSKNPKINKFKGKGALLAPQAAGAWPIVGHLPQLVGPKPL |
| | FRILGAMADNYGPIFMLRFGVHPTVVVSSWEMTKECFTTNDRHLASRPSNAASQYLIYEVYALFGFSLYG |
| | SSYWRDARKIATLELLSHRRLELLKHVPYTEIDTCIKQLHRLWTKNNKNQNNPELKVEMNQFFTDLTMNV |
| | ILKLVVGKRFFNVDDAADHEKEEARKIQGTIFEFFKLTEGSVSAGALPLLNWLDLNGQKRAMKRTAKKMD |
| | SIAEKLLDEHRQKRLSKEGVKGTHDHNDFMDVLLSILDADQGDYSHHPFNYSRDHVIKATTLSMILSSMS |
| | ISVSLSWALSLLLNNRHVLKKAQDELDMNVGKDRQVEEGDIKNLVYLQAIVKETFRMYPANPLLLPHEAI |
| | EDCKIGGFNVPAGTRVVVNAWKLQHDPRVWSNPSEFKPERFLNDQAAKVVDVRGQNFEYLPFGSGRRVCP |
| | GISFSLQTIHMSLARLVQAFELGTPSNERIDMTEGSGLTMPKTTPLHVLLNPRLPLPLYE |
| GflCYP82-8 | MELINSLEIQPITISILALLTVSILLYKIIWNHGSRKNNKSNKNNRKTSSSAGVVEIPGAWPIIGHLHLF |
| | NGSEQMFHKLGSLADQYGPAPFFIRFGSRKYVVVSNWELVKTCFTAQSQIFVSRPPMLAMNILFFPKDSL |
| | SYIQHGDHWRELRKISSTKLLSSHRVETQKHLIASEVDYCFKQLYKLSNNGEFTLVRLNTWCEDMALNVH |
| | VRMIAGMKNYVAAPGSGEYGGQARRYRKALEEALDLLNQFTITDVVPWLGWLDHERDVVGRMKRCGAELD |
| | SIFATWVEEHRVKRASGKGGDVEPDFIDLCWESMEQLPGNDPATVIKLMCKEHIENGSGTSSLTLAWILS |
| | LIMNNPYVIKKAREELEKHVGNHRQVEESDLPNLLYIQAIIKEGMRLYTPGPFIDRNTTEDYEINGVHIP |
| | AGTCLYVNLWKIHRDPNVYEDPLEFKPERFLKNNSDLDLKGQNYQLLPFGAGRRICPGVSLALPLMYLTV |
| | SRLIHGEDMKLPKGVEKADMTAHGGVINQRAYPLEVLLKPRLTFQQA |
| SdiCYP82-3 | MTIGALALLSFIYFLRVSVIKRTKYTNTAVTATNKLENDEDEANHSKRVVAPPEVAGAWPILGHLPQLVG |
| | LKQPLERVLGDMADKYGPIFIVREGMYPTLVVSSWEMAKECETTNDRVLASRPASASGKYLTYNYAMFGE |
| | TNGPYWREIRKISMLELLSHRRVELLKHVPSTEIDSSIKQLYHLWVENQNQNKQGDHQVKVDMSQLLRDL |
| | TLNIVLKLVVGKRLFNNNDMDHEQDEAARKLQKTMVELIKVAGASVASDALPFLGWLDVDGLKRTMKRIA |
| | KEIDVIAERWLQEHRQKKLTSNDKGGSNNIQGGGGDNDEMDVMLSILDDDSNEFINYNRDTVIKATSLTM |
| | ILAGSDTTTLSLTWALTLLATNPGALRKAQDELDTKVGRDRQVDERDIKNLVYLQAIVKETLRMYPAAPL |
| | AIPHEATQDCIVGGYHVTAGTRVWVNLWKLQRDPHAWPNPSEFRPERFLAVENDCKQQGTCDGEAANMDF |
| | RGQHFEYMPFGSGRRMCPGINFAIQIIHMTLARLLHSFELRVPEEEVIDMAEDSGLTISKVTPLELLLTP |
| | RLPLPLYI |
| SdiCYP82-6 | FCQFQGIVGILLAFLTFLYYLWRASITGLRTKPKHNDFKVTKAAPEADGAWPIVGHFAQFIGPRPLFRIL |
| | GDMADKYGSIFMVREGMYPTLVVSSWEMAKECETTNDRFLASRPASAAGKYLTYDFAMLSFSFYGPYWRE |
| | IRKISMLELLSHRRVELLKHVPSTEIDSSIKQLYHLWVENQNQNKQGDHQVKVDMSQLLRDLTLNIVLKL |
| | VVGKRLENNNDMDHEQDEAARKLQKTMVELIKVAGASVASDALPFLGWLDVDGLKRTMKRIAKEIDVIAE |
| | RWLQEHRQKKLTSNDKGGSNNIQGGGGDNDEMDVMLSILDDDSNEFINYNRDTVIKATSLTMILAGSDTT |
| | TLSLTWALTLLATYPLCALRKAQDELDTKVGRDRQVDERDIKNLVYLQAIVKETLRMYPAAPLAIPHEAT |
| | QDCIVGGYHVTAGTRVWVNLWKLQRDPHAWPNPSEFRPERFLAVENDCKQQGTCDGEAANMDFRGQHFEY |
| | MPFGSGRRMCPGINFAIQIIHMTLARLLHSFELRVPEEEVIDMAEDSGLTISKVTPLELLLTPRLPLPLY |
| | I |
| CmaCYP82-6 | MDLFIFFSREQYIVGLLAFLTFFYYLWRVSITGTRIKTNQNIMNGTNMMAPEAAGAWPIVGHLPQLVGPQ |
| | PLFKILGDMADKYGSIFMVREGMHPTLVVSSWEMAKECETTNDKFLASRPTSAGGKYLTYDFAMFGESFY |
| | GPYWREIRKISTLELLSHRRVELLKHVPYTEIGGSIKQLYKLWMETQNQNKQRDDHQVKVDMSQVFGYLT |
| | LNTVLKLVVGKGLENNNDMNHEQEEGRKLHETVLEFFKLAGVSVASDALPFLGWLDVDGQKRSMKRIAKE |
| | MDLIAERWLQEHRQKRLTSNNKASSGHDDFMSVLLSILDDDSNFFNYNRDTVIKATSLNLILAASDTTSV |
| | SLTWVLSLLVTNPGALKKVQDELDTKVGRNRHVEERDIEKLVYLQATVKETLRMYPAGPLSVPHEATQDC |
| | TVGGYQVTAGTRLVVNVWKLQRDPRVWPNPSEFKPERFLPDGCEVGCGEAANMDFRGQHFEYIPFGSGRR |
| | MCPGIDFAIQIIHMTLACLLHAFEFQVPSSLDKHLVPAVIDMSEGSGLTMPKVTPLEVLLNPRLPLPLYE |
| | L |
| EcaCYP82-5 | MEKPILLQLQPGILGLLALMCFLYYVIKVSLSTRNCNQLVRHPPEAAGSWPIVGHLPQLVGSGKPLFRVL |
| | GDMADKFGPIFMVREGVHPTLVVSSWEMAKECETSNDKFLASRPPSAASIYMAYDHAMLGESSYGPYWRE |
| | IRKISTLHLLSHRRLELLKHVPHLEIHNFIKGLYGIWKDHQKQQQQPTARDDQDSVMLEMSQLEGYLTLN |
| | IVLSLVVGKRVCNYHADGHLDDGEEAGQGQKLHQTITDFFKLSGVSVASDALPFLGLFDLDGQKKIMKRV |
| | AKEMDEVAERWLQDKKSSLLLSSKSNNKQNEAGEGDVDDEMDVLMSTLPDDDDSFETKYSRDTVIKANSL |
| | SMVVAGSDTTSVSLTWALSLLLNNIQVLRKAQDELDTKVGRDRHVEEKDIDNLVYLQAIVKETLRMYPAG |
| | PLSVPHEAIEDCNVGGYHIKTGTRLLVNIWKLQRDPRVWSNPSEFRPERFLDNQSNGTLLDERGQHFEYI |
| | PEGSGRRMCPGVNLATPILHMTLARLLQSFDLTTPSSSPVDMTEGSGLTMPKVTPLKVLLTPRLPLPLYD |
| | Y |
| PbrCYP82-5 | MDVAIIVDHHYLQPFVSIAGLLALLSFFYCIWVFIIRPRIIKSNLDERKLSPSSPPEVAGAWPIVGHLPQ |
| | LIGSTPLFKILADMSNKYGPIFMVREGMYPTLVVSSWEMSKECFTTNDRLFATRPPSAAGKYLTKALFAF |
| | SVYGPYWREIRKISTIHLLSLRRLELLKHGRYLEIDKCMKRLFEYWMEHHKNIISTTSSVKVNMSQVFAE |
| | LSLNVVLKIIVGKTLFIKNGNEDYTKEEEEGQKLHKTILKFMELAGVSVASDVLPFLGWLDVDGQKKQMK |
| | RVYKEMNLIASKWLGEHRERKRLQIIQKRGAARGSNYDDGNDFMDVLMSILDEENDDLFEGYSRDTVIKS |
| | TCLQLIVAASDTTSLAMTWALSLLLTNPNVLQKAQDELDTKVGRDRIIEEHDIECLVYLQAIVKETLRLY |
| | PPAPLSLPHEAMEDCTVGGYQVKAGTRLVVNLWKLQRDPRVWSNPLEFKPERFLPQSDGGFGGEEARMDF |
| | RGQHFEYTPFGSGRRICPGIDEFLQTVHMALARLLQAFDENTAGGLVIDMVEGPGLTMPKVTPLEVHLNP |
| | RLPVTLY |
| PbrCYP82-6 | MQVDWPNILQKYYPIITCSLLTLLSFYYIWVSITKPSRNSKTKLPPPEVAGSWPIVGHLPQLVGSTPLEK |
| | ILANMSDKYGPIFMVREGMHPTLVVSSWEMSKECETTNDKFLASRPPSASAKYLGYDNAMFVFSDYGPYW |
| | REIRKISTLQLLTHKRLDSLKNIPYLEINSCVKTLYTRWAKTQSQIKQNVGGAADDFVKVDMTEMFGHLN |
| | LNVVLRLVVGKPIFIQKDNADEDYTKDGHNKEELGQKLHKTIIEFFELAGASVASDVLPYLGWLDVDGQK |
| | KRMKKIAMEMDLFAQKWLEEHRQKGINHDNENDFMAVLISVLGEGKDDHIEGYSRDTVIKATCLTLIVAA |
| | TDTTLVSLTWALSLLLTNPRVLSKAQDELDTVVGKERNVEDRDVNHLVYLQAVIKETLRLYPPSPLAVPH |
| | EAIENCNVGGYEVKARTRLLVNLWKIHRDPRVWSNPLEFKPERFLPKLDGGTGEASKLDFKGQDFVYTPF |
| | GSGRRMCPGINFASQTLHMTLARLLHAFDFDIESNGLVIDMTEGSGLTMPKVTPLQVHLRPRLPATLY |
| McaCYP82-4 | MIMMFIDYYSSWLPQTLLLQSILLAVSLVIFINLFLTRRRSYSSKSHTNIIHPPKAAGALPVIGHLYTLF |
| | RGLSAGVPLYRQLDAMADRYGPAFIIHLGVYPTLVVTCRELAKECETTNDQTFATRPSTCAGKYIGYNYA |
| | FFGFAPYGPYWREARKIATVELLSNYRLDSLRHVREAEVGRNVDELYALHASSSTNKQNMMKIDMKQWFD |
| | QVTLNVILMMVVGKRCVTTGGNEEEVRVVKVLHEFFKHLGTLSVSDVVPYVEWMDLDGNIGRMKSTAKEL |
| | DCILGRWLEEHRRERRSDFMDAMLAMVEGIKIPYYDSDTVIKAICLNLLNAGSDTLGITMTWALSLLLNN |
| | RHVLKKVKDELDVHVGKNRQVEELDVKNLVYLHAVVKETLRLFPPAPLGVPHEAMEDCVVGGFHVAKGTR |
| | LVVNVWKLHRDPSVWSDPLAFKPERFLDNNTVDVRGQHFQLLPFGSGRRGCPGITFALQVAHLTLARLLH |
| | GFEWDTPDGAPVDMSEVSVLTTAKKNPVEVLFTPRLPAEVYTQN |
| NsaCYP82-4 | MLSIHDSTMVFLQLQAICGIFGFIFIITWWTRWKSSNKMKAPEVAGAWPVIGHLHLLGGGRPLYQLLGDM |
| | SDKYGPAFTLRMGIQKALVVSSWEVAKECLTTNDRALATRPSSAGGKYMGYNNALIPFSPYGPYWRDMRK |
| | IATLELLSNHRLEELKHVREMEINTCISDMYKLCQVEDGVEIKPISVDLSQWFADLTFNVVVMMITGKRY |
| | IGSTDAGDMNEIRHFQAALVKFMRLLRISLLVDVFPVLQWINYGGFKGVMKSTARDIDSVLENWLQEHQR |
| | KRLSPDENGNHDFIDVMISTLEGTEFSDYDHNTIIKAISMAMVVGGTDTTTTTLIWAISLLLNNPNAMKK |
| | VQEELEIHVGKERNVDGSDIQHLVYLQAVVKETLRLYPPVPLSVMHQAMEDCVIGSYNIQAGTRVLFNLW |
| | KLHRDSSVWSDPLEFRPERFLTSHVDVDVRGQHFELIPFGSGRRSCPGISFALQVIHLTIARLFHGFNLT |
| | TPGNSSVDMSEISGATLSKVTPLEVLVTPRLSSKLYN |
| HcaCYP82-10 | MDSLLQLQIIGALAALIFTYKLLKVICRSPMTDGMEAPEPPGAWPIIGHLHLLGGQDPIARTLGVMTDKY |
| | GPILKLRLGVHTGLVVSNWELAKECFTTNDRVLASRPMGAAGKYLGYNYAIFGLAPHGPYWSEVRKIVLR |
| | ELLSNQSLEKLKHVRISEINTCLKNLFSLNNGNTPIKVDMKQWEERPMENVVTMMIAGKRYFSMENDNEA |
| | MNFRKVATEEMYLTGVEVVSDALPYLEWLDLQGHVSAMKRTAKELDIHVGKWLEEHRRAKLLGETKNEDD |
| | FVDVLLTILPEDLKDNQTYIHDRDTIIKATALALFLAASDTTAITLTWALSLILNNPDVLKRAQDELDKH |
| | VGKEKLVKESDIINLVYLQAIIKETLRLYPAAPLLLPHEAMEDCTVGGYHVPKGTRIFVNIWKLQRDPRV |
| | WFDPNEFRPERFLTTHANVDFKGQHFEYIPFSSGRRVCPGITFSTQIMHLTLAHLLHEFNIVTPTKSNAG |
| | VDMTESLGITMPKATPLEVLLTPRLPSNLYNQYRD |
| EcaCYP82-7 | MNLLIFFQFLLQFQVLVGLSVLLAFSYYLWVSKNPKINKFKGKGALLAPQAAGAWPIVGHLPQLVGPKPL |
| | FRILGAMADNYGPIFMLRFGVHPTVVVSSWEMTKECFTTNDRHLASRPSNAASQYLIYEVYALFGFSLYG |
| | SSYWRDARKIATLELLSHRRLELLKHVPYTEIDTCIKQLHRLWTKNNKNQNNPELKVEMNQFFTDLTMNV |
| | ILKLVVGKRFFNVDDAADHEKEEARKIQGTIFEFFKLTEGSVSAGALPLLNWLDLNGQKRAMKRTAKKMD |
| | SIAEKLLDEHRQKRLSKEGVKGTHDHNDFMDVLLSILDADQGDYSHHPFNYSRDHVIKATTLSMILSSMS |
| | ISVSLSWALSLLLNNRHVLKKAQDELDMNVGKDRQVEEGDIKNLVYLQAIVKETFRMYPANPLLLPHEAI |
| | EDCKIGGFNVPAGTRVVVNAWKLQHDPRVWSNPSEFKPERFLNDQAAKVVDVRGQNFEYLPFGSGRRVCP |
| | GISFSLQTIHMSLARLVQAFELGTPSNERIDMTEGSGLTMPKTTPLHVLLNPRLPLPLYE |
| GflCYP82-8 | MELINSLEIQPITISILALLTVSILLYKIIWNHGSRKNNKSNKNNRKTSSSAGVVEIPGAWPIIGHLHLF |
| | NGSEQMFHKLGSLADQYGPAPFFIRFGSRKYVVVSNWELVKTCFTAQSQIFVSRPPMLAMNILFFPKDSL |
| | SYIQHGDHWRELRKISSTKLLSSHRVETQKHLIASEVDYCFKQLYKLSNNGEFTLVRLNTWCEDMALNVH |
| | VRMIAGMKNYVAAPGSGEYGGQARRYRKALEEALDLLNQFTITDVVPWLGWLDHFRDVVGRMKRCGAELD |
| | SIFATWVEEHRVKRASGKGGDVEPDFIDLCWESMEQLPGNDPATVIKLMCKEHIFNGSGTSSLTLAWILS |
| | LIMNNPYVIKKAREELEKHVGNHRQVEESDLPNLLYIQAIIKEGMRLYTPGPFIDRNTTEDYEINGVHIP |
| | AGTCLYVNLWKIHRDPNVYEDPLEFKPERFLKNNSDLDLKGQNYQLLPFGAGRRICPGVSLALPLMYLTV |
| | SRLIHGFDMKLPKGVEKADMTAHGGVINQRAYPLEVLLKPRLTFQQA |
| SdiCYP82-3 | MTIGALALLSFIYFLRVSVIKRTKYTNTAVTATNKLENDEDEANHSKRVVAPPEVAGAWPILGHLPQLVG |
| | LKQPLFRVLGDMADKYGPIFIVRFGMYPTLVVSSWEMAKECFTTNDRVLASRPASASGKYLTYNYAMFGF |
| | TNGPYWREIRKISMLELLSHRRVELLKHVPSTEIDSSIKQLYHLWVENQNQNKQGDHQVKVDMSQLLRDL |
| | TLNIVLKLVVGKRLFNNNDMDHEQDEAARKLQKTMVELIKVAGASVASDALPFLGWLDVDGLKRTMKRIA |
| | KEIDVIAERWLQEHRQKKLTSNDKGGSNNIQGGGGDNDFMDVMLSILDDDSNFFINYNRDTVIKATSLTM |
| | ILAGSDTTTLSLTWALTLLATNPGALRKAQDELDTKVGRDRQVDERDIKNLVYLQAIVKETLRMYPAAPL |
| | AIPHEATQDCIVGGYHVTAGTRVWVNLWKLQRDPHAWPNPSEFRPERFLAVENDCKQQGTCDGEAANMDF |
| | RGQHFEYMPFGSGRRMCPGINFAIQIIHMTLARLLHSFELRVPEEEVIDMAEDSGLTISKVTPLELLLTP |
| | RLPLPLYI |
| SdiCYP82-6 | FCQFQGIVGILLAFLTFLYYLWRASITGLRTKPKHNDFKVTKAAPEADGAWPIVGHFAQFIGPRPLFRIL |
| | GDMADKYGSIFMVREGMYPTLVVSSWEMAKECFTTNDRFLASRPASAAGKYLTYDFAMLSFSFYGPYWRE |
| | IRKISMLELLSHRRVELLKHVPSTEIDSSIKQLYHLWVENQNQNKQGDHQVKVDMSQLLRDLTLNIVLKL |
| | VVGKRLFNNNDMDHEQDEAARKLQKTMVELIKVAGASVASDALPFLGWLDVDGLKRTMKRIAKEIDVIAE |
| | RWLQEHRQKKLTSNDKGGSNNIQGGGGDNDFMDVMLSILDDDSNFFINYNRDTVIKATSLTMILAGSDTT |
| | TLSLTWALTLLATYPLCALRKAQDELDTKVGRDRQVDERDIKNLVYLQAIVKETLRMYPAAPLAIPHEAT |
| | QDCIVGGYHVTAGTRVWVNLWKLQRDPHAWPNPSEFRPERFLAVENDCKQQGTCDGEAANMDFRGQHFEY |
| | MPFGSGRRMCPGINFAIQIIHMTLARLLHSFELRVPEEEVIDMAEDSGLTISKVTPLELLLTPRLPLPLY |
| | I |
| CmaCYP82-6 | MDLEIFFSRFQYIVGLLAFLTFFYYLWRVSITGTRIKTNQNIMNGTNMMAPEAAGAWPIVGHLPQLVGPQ |
| | PLFKILGDMADKYGSIFMVREGMHPTLVVSSWEMAKECFTTNDKFLASRPTSAGGKYLTYDFAMFGFSFY |
| | GPYWREIRKISTLELLSHRRVELLKHVPYTEIGGSIKQLYKLWMETQNQNKQRDDHQVKVDMSQVFGYLT |
| | LNTVLKLVVGKGLFNNNDMNHEQEEGRKLHETVLEFFKLAGVSVASDALPFLGWLDVDGQKRSMKRIAKE |
| | MDLIAERWLQEHRQKRLTSNNKASSGHDDFMSVLLSILDDDSNFFNYNRDTVIKATSLNLILAASDTTSV |
| | SLTWVLSLLVTNPGALKKVQDELDTKVGRNRHVEERDIEKLVYLQATVKETLRMYPAGPLSVPHEATQDC |
| | TVGGYQVTAGTRLVVNVWKLQRDPRVWPNPSEFKPERFLPDGCEVGCGEAANMDFRGQHFEYIPFGSGRR |
| | MCPGIDFAIQIIHMTLACLLHAFEFQVPSSLDKHLVPAVIDMSEGSGLTMPKVTPLEVLLNPRLPLPLYE |
| | L |
| EcaCYP82-5 | MEKPILLQLQPGILGLLALMCFLYYVIKVSLSTRNCNQLVRHPPEAAGSWPIVGHLPQLVGSGKPLFRVL |
| | GDMADKFGPIFMVREGVHPTLVVSSWEMAKECFTSNDKFLASRPPSAASIYMAYDHAMLGFSSYGPYWRE |
| | IRKISTLHLLSHRRLELLKHVPHLEIHNFIKGLYGIWKDHQKQQQQPTARDDQDSVMLEMSQLFGYLTLN |
| | IVLSLVVGKRVCNYHADGHLDDGEEAGQGQKLHQTITDFFKLSGVSVASDALPFLGLEDLDGQKKIMKRV |
| | AKEMDFVAERWLQDKKSSLLLSSKSNNKQNEAGEGDVDDFMDVLMSTLPDDDDSFFTKYSRDTVIKANSL |
| | SMVVAGSDTTSVSLTWALSLLLNNIQVLRKAQDELDTKVGRDRHVEEKDIDNLVYLQAIVKETLRMYPAG |
| | PLSVPHEAIEDCNVGGYHIKTGTRLLVNIWKLQRDPRVWSNPSEFRPERFLDNQSNGTLLDFRGQHFEYI |
| | PFGSGRRMCPGVNLATPILHMTLARLLQSFDLTTPSSSPVDMTEGSGLTMPKVTPLKVLLTPRLPLPLYD |
| | Y |
| PbrCYP82-5 | MDVAIIVDHHYLQPFVSIAGLLALLSFFYCIWVFIIRPRIIKSNLDERKLSPSSPPEVAGAWPIVGHLPQ |
| | LIGSTPLFKILADMSNKYGPIFMVREGMYPTLVVSSWEMSKECFTTNDRLFATRPPSAAGKYLTKALFAF |
| | SVYGPYWREIRKISTIHLLSLRRLELLKHGRYLEIDKCMKRLFEYWMEHHKNIISTTSSVKVNMSQVFAE |
| | LSLNVVLKIIVGKTLFIKNGNEDYTKEEEEGQKLHKTILKFMELAGVSVASDVLPFLGWLDVDGQKKQMK |
| | RVYKEMNLIASKWLGEHRERKRLQIIQKRGAARGSNYDDGNDFMDVLMSILDEENDDLFEGYSRDTVIKS |
| | TCLQLIVAASDTTSLAMTWALSLLLTNPNVLQKAQDELDTKVGRDRIIEEHDIECLVYLQAIVKETLRLY |
| | PPAPLSLPHEAMEDCTVGGYQVKAGTRLVVNLWKLQRDPRVWSNPLEFKPERFLPQSDGGFGGEEARMDF |
| | RGQHFEYTPFGSGRRICPGIDEFLQTVHMALARLLQAFDENTAGGLVIDMVEGPGLTMPKVTPLEVHLNP |
| | RLPVTLY |
| PbrCYP82-6 | MQVDWPNILQKYYPIITCSLLTLLSFYYIWVSITKPSRNSKTKLPPPEVAGSWPIVGHLPQLVGSTPLEK |
| | ILANMSDKYGPIFMVREGMHPTLVVSSWEMSKECETTNDKFLASRPPSASAKYLGYDNAMFVFSDYGPYW |
| | REIRKISTLQLLTHKRLDSLKNIPYLEINSCVKTLYTRWAKTQSQIKQNVGGAADDFVKVDMTEMFGHLN |
| | LNVVLRLVVGKPIFIQKDNADEDYTKDGHNKEELGQKLHKTIIEFFELAGASVASDVLPYLGWLDVDGQK |
| | KRMKKIAMEMDLFAQKWLEEHRQKGINHDNENDFMAVLISVLGEGKDDHIEGYSRDTVIKATCLTLIVAA |
| | TDTTLVSLTWALSLLLTNPRVLSKAQDELDTVVGKERNVEDRDVNHLVYLQAVIKETLRLYPPSPLAVPH |
| | EAIENCNVGGYEVKARTRLLVNLWKIHRDPRVWSNPLEFKPERFLPKLDGGTGEASKLDFKGQDFVYTPF |
| | GSGRRMCPGINFASQTLHMTLARLLHAFDFDIESNGLVIDMTEGSGLTMPKVTPLQVHLRPRLPATLY |
| PbrCYP82-7 | MMDLAMFIDQYFSLAKIAGLLALLSFFYYLWISTLWSPRNPKLSSVSPPEVAGAWPILGHLPQLLGSRPL |
| | FKILADMSDNYGPIFMVREGMHPTLVVSSWEMAKECETTNDRFLAGRPSGAANKYLTFALFGESTYGPYW |
| | REIRKIATLHLLSHRRLELLKHVPDLEVTNCMKHLHRRWIDSQNQIKQNDAAAGSVKVDMGRVFGELTLN |
| | VVLKLVAGKSIFFKNDNTRQYDSKDGHNKEEEEGKKLHKTIIDFYSLAGASVASDVLPFLGWLDVDGQKK |
| | RMKRVAKDMDFIAAKWLEEHRHQKRQTVLSSSATLGSSNHDDAKDFMDVLMSILDGENDDLFEGYSRDTV |
| | IKTTCLQLIAAAADTTSVTMTWALALLITNPTILRKAQDELDTKVGKDRNIEERDINDLVYLQAIVKETL |
| | RMYPAGPLNVPHEAIADCNIGGYEVRAGTRLLVNLWKMHRDPRVWSNPSEFKPERFLPQLDGGSGGEAAN |
| | LDERGQDFEYLPFSAGRRMCPGIDFSLQTLHMTLARLLHGEDENNDSAGIIIDMEEGSGLTMPKLTPLEI |
| | YLCPRLPAKLY |

TABLE 8
N-methyltransferase and N-modifying candidate enzymes

| Name | Sequence |
|---|---|
| TfCNMT | MAVEGKQVAPKKAIIVELLKKLELGLVPDDEIKKLIRIQLGRRLQWGCKSTYEEQIAQLVNLTHSLRQMKIATEVETLDDQMYEVPIDFLKIMNGS |
| | NLKGSCCYFKNDSTTLDEAEIAMLELYCERAQIKDGHSVLDLGCGQGALTLYVAQKYKNSRVTAVTNSVSQKEFIEEESRKRNLSNVEVLLADITT |
| | HKMPDTYDRILVVELFEHMKNYELLLRKIKEWMAKDGLLFVEHICHKTFAYHYEPIDEDDWFTEYVFPAGTMIIPSASFFLYFQDDVSVVNHWT |
| | LSGKHFSRTNEEWLKRLDANVELIKPMFVTITGQCRQEAMKLINYWRGFCLSGMEMFGYNNGEEWMASHVLFKKK |
| cjCNMT | MAVEAKQTKKAAIVELLKQLELGLVPYDDIKQLIRRELARRLQWGYKPTYEEQIAEIQNLTHSLRQMKIATEVETLDSQLYEIPIEFLKIMNGSNLK |
| | GSCCYFKEDSTTLDEAEIAMLDLYCERAQIQDGQSVLDLGCGQGALTLHVAQKYKNCRVTAVTNSVSQKEYIEEESRRRNLLNVEVKLADITTHE |
| | MAETYDRILVIELFEHMKNYELLLRKISEWISKDGLLFLEHICHKTFAYHYEPLDDDDWFTEYVFPAGTMIIPSASFFLYFQDDVSVVNHWTLSGK |
| | HFSRTNEEWLKRLDANLDVIKPMFETLMGNEEEAVKLINYWRGFCLSGMEMFGYNNGEEWMASHVLFKKK |
| PsCNMT | MQLKAKEELLRNMELGLIPDQEIRQLIRVELEKRLQWGYKETHEEQLSQLLDLVHSLKGMKMATEMENLDLKLYEAPMEFLKIQHGSNMKQSA |
| | GYYTDESTTLDEAEIAMLDLYMERAQIKDGQSVLDLGCGLGAVALFGANKFKKCQFTGVTSSVEQKDYIEGKCKELKLTNVKVLLADITTYETEER |
| | FDRIFAVELIEHMKNYQLLLKKISEWMKDDGLLFVEHVCHKTLAYHYEPVDAEDWYTNYIFPAGTLTLSSASMLLYFQDDVSVVNQWTLSGKHY |
| | SRSHEEWLKNMDKNIVEFKEIMRSITKTEKEAIKLLNFWRIFCMCGAELFGYKNGEEWMLTHLLFKKK |
| PsTNMT | MGSIDEVKKESAGETLGRLLKGEIKDEELKKLIKFQFEKRLQWGYKSSHQEQLSFNLDFIKSLKKMEMSGEIETMNKETYELPSEFLEAVFGKTVK |
| | QSMCYFTHESATIDEAEEAAHELYCERAQIKDGQTVLDIGCGQGGLVLYIAQKYKNCHVTGLTNSKAQVNYLLKQAEKLGLTNVDAILADVTQY |
| | ESDKTYDRLLMIEAIEHMKNLQLFMKKLSTWMTKESLLFVDHVCHKTFAHFFEAVDEDDWYSGFIFPPGCATILAANSLLYFQDDVSVVDHWV |
| | VNGMHMARSVDIWRKALDKNMEAAKEILLPGLGGSHETVNGVVTHIRTFCMGGYEQFSMNNGDEWMVAQLLFKKK |
| EcTNMT | MGSSAGEIMGRLMKGEIEDEELKKLIRHQWDRRIEWGYKPTHEKQLAFNLDFIKGLKEMVMSGEIDTMNKETYELPTAFLEAVFGKTVKQSCC |
| | YFKDENSTIDEAEEAAHELYCERAQIKDGQTVLDIGCGQGGLVLYIAEKYKNCHVTGLTNSKAQANYIEQQAEKLELTNVDVIFADVTKFDTDKT |
| | YDRILVVETIEHMKNIQLFMKKLSTWMTEDSLLFVDHISHKTFNHNFEALDEDDWYSGFIFPKGCVTILSSSTLLYFQDDVSALDHWVVNGMH |
| | MARSVEAWRKKLDETIEAAREILEPGLGSKEAVNQVITHIRTFCIGGYEQFSYNNGEEWMITQILFKKK |
| PsRNMT | MSTTMETTKISQQDDLWKNMELGQISDEEVRRLMKIGIEKRIKWGTKPTQQEQLAQLLDFNKSLRGMKMATEIDTLENHKIYETPESFNQIIG |
| | GKESAGLFTDETTTTMEEANTKMMDLYCERAGLKDGHTILDLGCGAGLLVLHLAKKYKKSKITGITNTSSHKEYILKQCKNLNLSNVEIILADVTK |
| | VDIESTFDRVFVIGLIEHMKNFELFLRKISKWMKDDGLLLLEHLCHKSFSDHWEPLSEDDWYAKNFFPSGTLVIPSATCLLYFQEDVTVIDHWILS |
| | GNNFARSNEVILKRIDGKIEEVKDIFMSFYGIGREEAVKLINWWRLLCITANELFKYNNGEEWLISQLLFKKKLMTCI |
| TfPNMT | METKQTKKEAVANLIKRIEHGEVSDEEIRGMMKIQVQKRLKWGYKPTHEQQLAQLVTFAQSLKGMEMAEEVDTLDAELYEIPLPFLHIMCGKT |
| | LKFSPGYFKDESTTLDESEVYMMDLYCERAQIKDGQSILDLGCGHGSLTLHVAQKYRGCKVTGITNSVSQKEFIMDQCKKLDLSNVEIILEDVTKF |
| | ETEITYDRIFAVALIEHMKNYELFLKKVSTWIAQYGLLFVEHHCHKVFAYQYEPLDEDDWYTEYIFPSGTLVMSSSSILLYFQEDVSVVNHWTLSG |
| | KHPSLGFKQWLKRLDDNIDEVKEIFESFYGSKEKAMKFITYWRVFCIAHSQMYSTNNGEEWMLSQVLFKKK |
| PbrTNMT1 | MGSIDEVKKESAGETLGRLLKGEIKDEELKKLIKFQFEKRLQWGYKSSHQEQLSFNLDFIKSLKKMEMSGEIETMNKETYELPSEFLEAVFGKTVK |
| | QSMCYFKHESATIDEAEEAAHELYCERAQIKDGQTVLDIGCGQGGLVLYIARKYKKCHVTGLTNSKAQVNYLLKQAEKLGLTNVDAILADVTQYE |
| | SDKTYDRLLMIEAIEHMKNLQLFMKKLSTWMTEESLLFVDHVCHKTFAHFFEAVDEDDWYSGFIFPPGCATILAANSLLYFQDDVSVVDHWVV |
| | NGMHMARSVDIWRKALDKNMEAAKEILLPGLGGSHEAVNGVVTHIRTFCMGGYEQFSMNDGDEWMVAQLLFKKK |
| PbrTNMT2 | MGSIEEVKKESAEETLGRLLRGEINDEELKKLIKYQLEKRLQWGYKSSHQEQLSFNLDFINSLKKMGMSGQVEAFTNEVYELPTECFEAAYGKSM |
| | KLSGCYFKHESSTIDEAEEASHELYCERAQIKDGQTVLDIGCGQGGLVLYVAQKYKNCHVTGLTNSKEQVNYILKQAEKLGLRNVDVILADVTQY |
| | ESDKTYDRILVIGVVEHMKNMQLFIKKLSTWMAEDSLLFVDHSCHKTFNHFFEALDEDDWYSGYIFPPGCATFLSADSLLYFQDDVSVVDHWV |
| | VNGMHFARTVDAWRKKLDKNMEAVKEILLPGLGGNHEAVNGVITHIRTCCVGGYVQFSLNDGDEWMNAQLLFKKK |
| AmeNMT1 | MCLFFAEKMGLMAEANNQQQLKKEDLLKNMELGLIPDEEIRKLIRVQLEKRLNWGYKSTHEQQLSQLLHLVHSLKKMKIATEMENLDLKLYEA |
| | PFSFVQIQHGSTIKESSGLFKDESTTLDEAEIAMLDLYTKRAKIEDGQSVLDLGCGLGAVTLYVAQKFKNCYVTGITSSVEQKDFIEGRCKELKLSNV |
| | KVILADITTYETEEKYNRIFAVELIEHMKNYELLLRKISEWMKQDGLLFIEHVCHKTLAYHYEPLDEEDWYTNYIFPAGTLTLSSATLLLYFQDDVAV |
| | VDQWTLSGKHYSRSHEEWLKRIDGNIEEVKEIMKSITKSEEEAKKLLNFWRIFCMCGAELFGYKNGEEWMMTHILFKKK |
| GflNMT1 | MDLMATSKQVKKKEELLKNMELGLVPDEEIRRLIRIELEKRLKWGYKPTHQQQLAQLLDLVHSLKKMKIATEMESLDLKLYEAPFSFVQIKHGSTI |
| | KESSSYFKDESMTLDEAEIAMLDLYVERAQIEDGQSVLDLGCGLGAVTLHVAKKYKNCHVTGLTNSVEQKDFIEGKCKELNLSNVKVILADVTSH |
| | EMEDKFDRIFAVELIEHMKNYELLLRRISKWMKDDGLLFIEHVCHKTFAYHYEPIDEDDWYTEYIFPAGTLTLSSASLLLYFQDDVSVVNHWTLSG |
| | KHYSRSHEEWLKRIDGNMDAVKEIMKSITKTEEEAVKLINFWRIFCMCGAELFGYKDGEEWMMSHVLFKKKQLLQQC |
| EcaNMT1 | MVDLKVEKEELLKSMELGLVPDEDIRKHIRSQLEKRLKWGYKPNHEQQLAQLLDVIHSLKKMKISKEYESFDLRLYEAPFDFHKIQLGTHLKESCS |
| | YYKDESTTLDEAEGAMLDLYTQKAKIEDGQSILDLGCGVGAVTLFVANKYKNCKVTGITSCQWQKDFIENKCKELNLTNVRVIIGDVTAYEMEET |
| | FDRIFAIELIEHMKNYELLLRKISKWMKDDGLLFIEHVCHKILAYPYEPIDEEDWFTEYIFPGGTLTLSSASLLLYFQDDVSVVEHSSLNGKHYSRSH |
| | GEWLKNIDANIDEVKGIMRSITKTEEEAVRLVNFWRIFCMCGIELFGYNNGEEWMVSHILLKKK |
| EcaNMT2 | MAADLVVKKWNNKKELIDEMELGLVGDEEIRELIRNDLEKRLKWGYKSNHEQQLAQLLHFVHSLRGMKIAADEVESFNIKVYEAPFSFNKIQLG |
| | SSLKESSCYYKHDETTLDEGEIAMMELYTEKAQIKDGQSVLDLGCGLGSLTLYVANKYPNCKVTGTTASLWHKDFIESKCKEQELTNVKIVLGDAT |
| | THEMEERFDRILAIGLIEHLKNYGLLLGRISKWLKDDGFLFIQHVCHKTLAYPLVPVDEEDWIGEYIFPGGTLTMPSASLLLYFQDELSVVDHSTLN |
| | GKHFSRTHEEWLKNIDAKIDEVKEILKSVTKTEEEVVRLTNFWRIFCMFGVEMFGYNEGEEWMLSQILFKKK |
| CmaNMT4 | MASGKVVDLLKRLDSGLVSDEELRRVIRFELERRLKWGYKPTHEQQLAELLNLAHATKQMEIATKIDTLNSTMYEVPNSFLEIQLGSTLKESCLYF |
| | KDESTTVDEAEIAMMDLYLERAQIKDGQIILDLGCGLGALAFHIAQKYTNCNVTSVTNSVKQKEFIEEKCKILNVSNVKVILTDICTLEMEATFDRI |
| | FAIGLIEHMKNYELLLRKFSAWMKQDGLLFIEHLCHKTLGYHNEPIDEDDWYTAYFFPAGTLTFIPSSFLLYFQDDVSVVNHWTLSGKHFSRSNE |
| | EWLKRMDNKIDEVKEIYKAAASETKDDDIMKLIRLWRFLSISAAEMFGYKDGEEWMISQVLFKKK |
| EcNMT3 | MASLVEEGSFVNNKESVKERVSELVKRLKNGLVSDEELRKLMRVELEKRLEWGYKSTHEQQLSQLIDLAHSMKKMEIAMEIDALNSTVYEVPLS |
| | FLQIIHGTTIKESCLYFKDESTTVDEAEIAMMDLYLERAQIKDGQSILDLGCGLGGFSFHIASKFTGCNITAVTNSVKQKEFIEEKCKTLNVPNIKVIL |
| | ADICTTEIENVFDRIIAIGLIEHMKNYELLLKKFSKWMTQDGLLFIEHLCHKTFGYHNEPLDEDDWYTTYFFPAGTLTFIPSSFLLYFQDDVSVVDH |
| | WTLNGKHFARSNEEWLKRMDEKMDEVKQIFRSNLKSENEVTKTIGEWRFLSMSAAEMFGYNNGEEWMVSQLLFKKK |
| GflNMT5 | MGSNETNGELKTKEMVPDLLKRLESGLVADEELRKLIRFELERRLKWGYKPTHEQQLAELLKLAHSTKQMKIATETDSLNSTMYEVPIPFLQLQF |
| | GSAIKESCCYFKDESTTLDEAEVAMMDLYLERTQIKDGQSILDLGCGLGALAFHIVQKYPNCNVLAITNSVEQKEFIEEKCKIRKVENVKVSLADIC |
| | TLEMKTTFDRIFAIGLLEHMKNYQLLLKKFSNWMKQDGLLFIEHLCHKTLAYHYEPLDEDDWYTEYFFPAGTLTIISSSFLLYFQDDVSIVNHWSL |
| | SGKHFSRSNEEWLKRMDMKIDEVKEILEAAFENKDHDITKLINHWRFLAINATEMFGYNNGEEWMVSQVLFKKK |
| ScaNMT1 | MASDHEVSNKELKKKKEVITELLKRLESGLVSDEELRGLIRFELERRLRWGYKPTHEQQLAQLLNLAHSMKQMKIATEIDALNSTMYEVPIPFLQI |
| | QLGSTLKESCCYFKDESTTVDEAEIAMMDLYLERAQIKDGQSILDLGCGLGALAFHIAQKYTNCNITAITNSVRQKEFIEEKCKILNVSNVKVSLADI |
| | CTLEMEATFDRIFAIGLIEHMKNYELLLKKFSEWMKQDGLIFIEHLCHKTLAYHYEPLDEDDWYTEYFFPAGTLTLISSSFLLYFQDDVSVVDHWTL |
| | SGKHFSRSNEEWLKRMDEKIDEVKEIFESVSDSKDDDVTKLINHWRFFCISSAEMFGYNNGEEWMISQVLFKKK |
| CchNMT3 | MIKKSKIMAFSDHHHEVVKNHSKKEMIADLLKRLEAGLVPDEEMRNLFRFELERRLQWGYKSIHQEQLSQLLKLAHSTKEMTIVAEMDALNSS |
| | MYELPISFLQIQLGSNLKQSSLYFKDELTTVDEAEVAIMDLYLERAQIEDGQSILDLGCGLGAFSFHVARKYTNCNITAVTNSLTQKEFIEKKSKILNI |
| | QNVKVIFADVTTVEMETTFDRVFAIGLIEHMQNYELFLKKLSKWMKQDGLLFIEHFCHKTLAYHYKPIDEDDWFTNLLYPNGTVISSSLLLYFQD |
| | DVSVVDHWSLSGKHFSRASEESLKRMDAKMDEMKEIFESITDSKEEAMKLINQWRIFCISCAEMFGYNNGEEWMTSHFLFKKKL |
| CchNMT6 | MGSSTASDHEMVIMENDSKNKQVVIADLLKRLVGGLVPDEEMRNMFRFELEKRLKWGYKSTHQQQLSQLLNLVELNKGIAKIAPEMDALNSA |
| | MYEVPIPYLKLMLGSTLKQSCLYFKDESTTLDEAEIEMMDLYLERADIQDGQSILDLGCGLGGLGFHIAQKYISCNITALTNSLTQKEFIEEKCKTLN |
| | IPNVKVILADVTTVEIETTFDRLFAIGLVEHMENYELFLRKLSKWMKQDGLLFIEHLCHKTLAYHYKPIDEDDWYSNLLYPTGTLTSASFLLYFQDD |
| | LSVVDHWSLSGKHFSRATEEWLKMIDANMDKIREIYESVTESKEEATRSINQWRIFCISCAEMFGYNDGEEWMISHFLFKNKKQIE |
| CchNMT1 | MATSDQEVKTSKMEMIADLLKRLEAGLVPDDEIRSLIRVELERRLKWGYKSTHQEQLDQLLNLAHSIKKMKIASTEMDGLTSTMYEVPISLVQIQ |
| | LGSHLKESCLYFKDETTTVDEAEIAMMDLYLERAQIKDGQSILDLGCGLGAVSFHIAQKYTSCNITAVTNSVRQKEFIEEKSKTLNVPNVKVLLADI |
| | TTLEMEHTFDRLFAISLIEHMENYELLLRKLSEWMKQDGLLFIEHLCHKTLSYHFEPMDEDDWYTNLLFPAGTLTLVSASFLLYFQDDLSVVNQW |
| | VMSGKHFSRANEEWLKNMDAKMDEMREIFESITDSEEEVVKLINHWRIFCISSAEMFAYNDGEEWMNSHVLFKKKKQIQ |
| CchNMT2 | MAGSGANKEMIADLLKRLEVGLVPDEEIRSLIRFQLKRRLKWGYKTTHQEQLEQLLSLAHSIRKMKIATEMDALNSTMYEVPISFMQIVFGSTLK |
| | ESCLYFKDEATTVNEAEIAMMDLYLERAQIKDGQSILDLGCGMGSLCFHIARKYTNCNITAVTNSVSQKEFIEEKSKTLNLPNVKVILADITTLEMD |
| | DTYDCLFAIGLIEHMKNYELLLRKLSNWMKQDSLLFIDHVCHKTLAYHYEPIDEDDWYTNLLFPAGTLTLVSASFLLYFQDDLSLVDHWSMSGKH |
| | FSRTNKEWLKNIDGKMDKIREIVKSITDSEEEVVKLINHWRMLCINSSEMFGFNDGEEWMNSHVLFKKKKQI |
| ScaNMT2 | MEMIADLLKRLEAGLVPDDEIRSLIRVELERRLKWGYKSTHQEQLDQLLNLAHSIKKMKIASTEMDGLTSTMYEVPISLVQIQLGSHLKESCLYFK |
| | DETTTVDEAEIAMMDLYLERAQIKDGQSILDLGCGLGSVCFHIARKYTSCNITAVTNSVSQKEFIEEKSKTLNVPNVKVLLADITTLEMDDTFDCLF |
| | AIGLIEHMENYELLLRKLSDWMKQDGLLFIDHVCHKTLSYHFEPMDEDDWYTNLLFPAGTLTLVSASFLLYFQDDLSLVDHWSMSGKHFSRTN |
| | KEWLKNIDGKMDKIREIVKSITDSEEEVVKLINHWRMLCINSSEMFGFNDGEEWMNSHVLFKKKKQI |
| PbrNMT2 | MCTTMDTTKISQQDDLWKNMELGLISDEEVRRLMKIETEKRIKWGTKPTQQEQLAQLLDFNKSLRGMKMATEVHALENHKIYEIPDSFNQIIG |
| | GKESAGLFTDEATTTIEEANTKMMDLYCERAGLKDGQTILDIGCGAGLLVLHLAKKYKNCKITGVTNTSWHKEHILEQCKNLNLSNVEVILADVT |
| | TVDIERTFDRVFVIGLIEHMKNFELFLRKISKWMKDDGLLFLEHLCHKSFSDHWEPLSEDDWYAKNFFPSGTLVIPSATCLLYFQEDVTVKDHWL |
| | LSGNNFARSNEAILKRIDSKIEEVKDIFMSFYGIGEEEAVKLINWWRLLCITANELFKYNNGEEWLISQLLFKKKLMTCI |
| PbrNMT1 | MVKGDQFQTTTMEETKISQENDLWTNMELGLIPDEEVRRLMKIEIEKRIEWGMKPTQHQQLAQLLDFTKSLRGMKMATELDKLDSKLYETPH |
| | SFNQIVNGSTLKESSGLYTDVTTTMDEASIKMMDLYCERANIKDGQTILDLGCGPGPLVLHIAKKYSNCKITGVTNAFSQREYILEECKKLSLSNVE |
| | IILADVTSLDLETTFDRVFVIGFIEHMKNFELFLRKISKWMKDDAVLFLEHFCHKSFSYHGEPLSEDDWYAKNFFAPGTLVIPSATCLLYFQEDLAVI |
| | DHWFLSGNHFARTNEEMLKGIDGKIEEIKDIFMSFYGINEAEAVKLINWWRLFCITGAEMFSYNNGEEWFISQLLFKKK |
| EcaNMT4 | MALEQEDSMSVPERNEGVADLIKRMELGLVNDEEIRRLMRIQIENRLKWGYKPTHDQQLAQHLHFINSLKEMKMATEMDSLDSQVYESPNSF |
| | QQIMCGRSMKESAGLFMDDVTTVEEAHIRMMDLYCDKATFEDGQKILDLGCGHGSVVLHVAQKYKGCQVTGVINSSAQKQYILEQCKKLDL |
| | SNVEIILADVTTLEMEEKFDRVIIIGLIEHMKNFKLFFQKVSKWMKEGGLLFLENYFHKDFAYHCEKIDEDDWYDGYIFPPGSLLMPSASTLLYFQE |
| | DLTVADHWVLPGTHFAKTFEEFLKKIDLRIEEVREIFEAFYGISKEEAMKLSNYWRNFCISAMEIFNYNNGQEWMISHLLYTKK |
| CmaNMT5 | METGKNNQNMKTTIDDLWNQMMLGIVPDKEIRRLMKIELKKRLDWGYRPTHQQQLSQLLDFAKGLCNYCVVTALRCMKMSAEFDTLDSKVY |
| | ETPKSFQQIMCGTTIKESSGLFMNESTTLDQAQISMLDLYFDKAKIKDGQSILDLGCGHGALILYLAQKYQNCNITGVTNSLSOKEFIVEKCKKLGL |
| | SNVEILLADVTKLEMEDMFDRVFVIGLIEHMKNFELFLRKISEWMKPDGLLFLEHYCHKSFAHQWEPIDEEDWFSKYIFPPGTVIIPSASFLLYFQE |
| | DVKVIDHWTLSGNHFARTQEEWLKGIDGHIDEVEKTFESFYGISKEEAVKLINFWRVFCLSGVEMFGYNNGEEWMISHLLFKKK |
| GBNMT4 | MTMEANNAKKEAIENLWEQMMMGLVPDHEITRLMKSELQKRLNWGYKPTHQQQISQLLDFAKSLRRMEMS |
| | LDFDNLELDTKMYETPESFQLIMSGTTLKESSGLFTDETATLDQTQIRMMDLYLEKAKIKDGQSILDLGC |
| | GHGALILHVAQKYRNCNVTGVTNSIAQKEFIFKQCKKLGLSNVEMVLADVTKCEMKATFDHIFVIGLIEH |
| | MKNFELFLRKVSEWMKSDGLLFMEHYCHKSFAYQWEPMDDDDLFSKYVFPPGSAIIPSASFLLYFQDDLT |
| | VVDHWTLSGNHFARTHQEWLKRIDSQSDEIKGIFESFYGISKEEAVKLINYWRVFCLFGVEMFGYNNGEE |
| | WMISHLLFKKK |
| CchNMT5 | MEVVATSSARNPKKEIVDLWKRMELGLIPDEEIRDLMKIGLEKRLKWGYKPTHEQQLSQLLHFAKSLRSM |
| | KMASEMETLDDQMYETPTAFQQLMCGSTIKESAGFFKDESTTLDEAEIKMLDLYCEKARIEDGQKILDLG |
| | CGHGAVMLHIAQKYKNCNVTGVTNSISQQQFIVQRSKELNLSNVNMILADVTMLEMDATYDRIFIIGLIE |
| | HMKNFELFLRKISKWITKEGLLFLEHYCHKTFAYQCEPVDEDDWYNMFIFPPGTLILPSASFLLYFQDDL |
| | IVVDRVVTLNGNHYARTQEEWLKRIDANVDGVKQMFESVCDGNKEEAVKLMNFWRIFCISGAEMLAYNNGE |
| | EWMISHYLFKKRN |
| NsNMT2 | MEATQITKKQGVAELIKRIENGQVPDEEITRMMKIQIQKRLKLGYKSTHEQQLAQLLHFVHSLQKMEMAE |
| | EVDTLDSELYEIPLPFLHIMCGKALKFSPGYFKDESTTLDESEVNMLDLYCERAQIEDGQTILDLGCGHG |
| | SLTLHVAKKYRGCKVTGITNSVSQKDFIMEECKKLNLSNVEIILEDVTKFETGTTYDRIFAVALIEHMKN |
| | YELFLKKVSAWMAQDGLLFVEHHCHKVFAYKYEPIDDDDWYTEYIFPTGTLVMSSSSILLYFQEDVSVVN |
| | HWTLSGKHPSLGFKQWLKRIDDNIDEIKEIFESFYGSKEKATKFITYWRVFCIAHSEMYATNGGEEWMLS |
| | QVLFKRK |
| ScaNMT5 | MGGVADLLKKMELGLVPEEEIRRLMRIIIEKRLEWGYKPTHAEQLDHLTNFIQCLRGMKMADEIDALDAK |
| | MYEIPLPFMQTICGSTLKFSPGYFKDESTTLDESEIHMMDLYCERAEVKDGHSILDLGCGHGGFVLHVAQ |
| | KYKNSIVTGVTNSVAEKEFIMTQCKKLCLSNVEIILADVTKFEPETTYDRVFAIALIEHMKNYELVLEKL |
| | SKWVAQDGFLFVEHHCHKVFPYKYEPLDEDDWYTEYIFPGGTIVLPSASILLYFQKDVSVVNHWSLNGKH |
| | PARGFKEWLKRLDENMDAVKAIFEPFYGSKEEAMKWITYWRVFCITHSEMYAYNNGEEWMLSQVLFKRK |
| JdiNMT1 | MSKGVAKLVERMELGLVSDDEVRRLMRILIEKRLKWGYKPTHEEQLTYLTNFIQGLKGMKIAEEIDALDA |
| | KMYEIPIAFMQILCGYSLKFSPGFFEDESTTLDESETIMMDLYCERAQVQDGQSILDLGCGHGGFVLHVA |
| | QKYKNCKVTGVTNSVSETEYIMEQCKKLGLSNVEIIIADVTKFEPEVTYDRVFAIALIEHMKNYELVLQK |
| | LSKWVAQDGFLFVDHHCHKVFPYKYEPIDEDDWYTQYIFPGGTLVLPSASILLYFQEDVSIVNHWTLSGN |
| | HPARGFKEWLKRLDDNMDEIKAIFEPFYGSKEEAMKWITYWRVFCITHSEMYAYNGGEEWMISQVLFKRK |
| BthNMT1 | MEVKQAGKEGVTELLVKRMELGLVPEEEIRRLMRIQIQKRLDWGYKPTHEEQLAHLTKFIQNIRGMKMAD |
| | EIDALDAKMYEIPLPFLQTICGKTLKFSPGYFKDESTTLDESETLMMDLYCERAQVKDGQSILDLGCGHG |
| | GFVLHLAQKYRNSVVTGVTNSVSETEYIKEQCKKLGLSNVEIIIADVTKFEPEVTYDRVFAIALIEHMKN |
| | YALVLNKISKWVAQDGYLFVEHHCHKVFPYKYEPLDEDDWYTNYIFPGGTLILPSASILLYFQEDVTVLN |
| | HWSLSGKHPSRGFIEWLKRLDENIDVIMGIFEPFYGSKEEATKWINYWRVFCMTHSEMYAYGNGEEWMLS |
| | QVLLKRK |
| MaqNMT3 | MELGLVPEKEIRRLMRIQIQKRLEWGYKPTHEEQLAHLTKFIQNIRGMKMADEIDALDAKMYEIPLPFLQ |
| | TICGKTLKFSPGYFKDESTTLDESETLMMDLYCERAQVKDGQSILDLGCGHGGFVLHLAQKYRNSIVTGV |
| | TNSVSETEYIKEQCKKLGLSNVEIIIADVTKFEPEVTYDRVFAIALIEHMKNYALVLNKISKWVAQDGYL |
| | FVEHHCHKVFPYKYEPLDEDDWYTNYIFPGGTLILPSASILLYFQEDVTVLNHWSLSGKHPSRGFIEWLK |
| | RLDENIDVIMGIFEPFYGSKEEATKWINYWRVFCITHSEMYAYGNGEEWMLSQVLLKRK |
| McaNMT4 | MDKANERELKRAELFKKLEDDLVTYDEIKQVMRTELAKRLEWGYKPTHQQQLAHLLDFAHALEGMKIANE |
| | VETLASEVYETPLPFXEIVLGPAKKXSSCLFEDESTTLEQAEIAMLDLYFERAQIRXGMSVLDLGCGXGS |
| | VGLHIARKYKNCXVTCITNSISQKQYIENQCKLYNLSNVKIILADIVAHDTDDTFDVVLVIGVIEHMKNY |
| | ALLLNKISKWMAKDGLLFVEHLCHKTFPYHFEPLDEDDWYSNFVFPTGTLTMPSVSFLLYFQADVSILNH |
| | WILSGKNFSRTXEEFLKRIDANVDAIKDGLKPSLGSEGVAKLISYWRGFCLTGMEMFGYNNGEEWMVSQV |
| | LFKNK |
| TcoNMT3 | MEDNNNLLQEEMNVVELLQRPELGLVPDEKIRKLTRLQLQKRLKWGYKPTHEAQLSHLFQFIHSLPSLNM |
| | ESEDENPKSWLYETPTSFLQLLYGDCIKESDTYYKEDTATLEEAVINMLELYCERARITEGLSVLDLGCG |
| | YGALTLHVAQKYKSCKVTGVTSSISQKQYIMEKCKKLNLTNVEIILADVATIEIEAASYDRIFALGIFEH |
| | VNDYKLFLGKLSKWMKQDGLLFVEYLCHKTFPYQNKPLDKGDKWYNEYVFPSGGLIIPSASFILYFQNDV |
| | SVVRQWTQGGQHSARTFEELLKRIDGNIDKIKEIFIESYGSKEDAVRFINYWRVFLITGVEMFSYNDGEE |
| | WMGAHFLFKKKFIMQE |
| CmuNMT4 | MEVKQSKGDELRSRVAELLERPELGLVPDEEIRRLAKARLEKRLKWGYKATHGEQLSSLLQFVESLPSLN |
| | MASEDDSPKAWLYETPTSFLQUYGDIIKESGSYYKDESTTLEEAMIHNMNLCCERANIKEGQSVVDLGC |
| | GYGAFILHVAQKYKTCRVTGITSSISQKHYIMEQCKKLNLSNVEVILADVATIKLDATFDRVFAAGMFEH |
| | VNDYKSFLRKITNWMKPDGRLFVEHLCNKTFPYQNKPLDDGDNWGEYVFPSGGLIIPSASLLLYFQEDVS |
| | IVNHWTFSGKHAANKFEELLKRIDAKIDAIKRIFNECYGSKDSIRFINYWRVFLITAAEMFGYNNGEEWM |
| | GVHLLFKKK |
| CtrNMT2 | GLKSSVAELLERPELGLVPDGEIRKLTKTRLAKRLEWGYKATHEDQLSHLLRFIHSLPSLNMASEDDSPK |
| | AWLYETPTSFLQUYGDIIKESGTYYKDESSTLEEAIIHNMDLCCERARIKEGQSVLDLGCGYGAFTLHV |
| | AQKYKSCSVTGITSSISQKDYIMEQCKKLNLSNVEVILADVATIKMNTTFDRVFALGMFEHINDYKLFLR |
| | RISNWMKHDGLLFVEHLCNKTFAYQNKPLDDGDDWFNEYVFPSAGLIIPSASLLLYFQEDVSIVHHWTFS |
| | GKHAAYKFEELLERIDAKIEAIKEIFIECYGSKEDAIRFINYWRVFLITAAEMFAYRDGEEWMGSHVLFK |
| | KK |
| CmuNMT5 | MEAKQHESNNNIDEELKNRVNIGEQEERPGFEDEEIRRLAKAQLAKRLKWGYKPTHEQQLSHLLQFLQSL |
| | PSLNMASEDESSKAWLYETPTSFLQLLFGNVIKFSGYYYKHESSTFEESMIHNMDLCCERANIKEGQNVI |
| | DLGCGYGAFVLHVAQKYKSCSVTGITCSITQKHHIMEECKKLNLCNVKVILADVATIELGTAFDRVFAFG |
| | MFEEINDYKLILRKISNWMKPDGLFFVEHLCHKTLAYQNKLIDDQDWYEEYIFPSGGLIVPSASLLLYFQ |
| | DDLSVVYHWTYNGKHGARSFEKMLERTDANIDTIKDMFTEFYGSKEKAIKFINYWRVFFITAAEMFAYND |
| | GEEWMCSQLLFKKK |
| CmuNMT8 | MEHKIEDIRKLKSRVEEQLERPELGLVKDEDIKTLAKAKLEKRLKWGYKPTYAEQLSNLLQFAQSLPSLK |
| | MENVDDQGSSKQWLYGVPSEFLQIIYGGIIKMSGSYYEDESTTLEESMIKDMDSCCEKANVKEGHSVLDI |
| | GCGYGSLIIHIAKKYRTCNVTGITNFVEQKQYIMEECKKLNLSNVEVIVGDGTTINLNTTTFDRVFVTGM |
| | LEEINDYKLFLKSVSDWMKPDGLLLVTHFCHKTFAYQNNKALDDEDWHNEYIFPSGNLIVPSASLLLYFQ |
| | EDLSVVSHWATNGTHTGRTCKKLVERIDANIEKIKEIFSEFYGSKEDAIRMINYWRVLCITGAEMYTCKD |
| | GEEWMDVYYLFKKK |

TABLE 9
Variants of BM3 N-demethylase

| BM3 | |
|---|---|
| variant | Genotype |
| 8F11 | L437A |
| 4119 | L181A, T260A, L437A |
| 8C7 | L75A, L181A |
| 4H5 | L75A, M177A, L181A |
| 7A1 | L75A, M177A, L181A, T260A |
| BM3 | |
| variant | Amino Acid Sequence |
| 8F11 | MTIKEMPQPKTFGELKNLPLLNTDKPVQALMKIADELGEIFKFEAPGRVTRYLSSQRLIKEACDESRFDKN |
| | LSQALKFARDFAGDGLVTSWTHEKNWKKAHNILLPSFSQQAMKGYHAMMVDIAVQLVQKWERLNADE |
| | HIEVSEDMTRLTLDTIGLCGFNYRFNSFYRDQPHPFIISMVRALDEVMNKLQRANPDDPAYDENKRQFQE |
| | DIKVMNDLVDKIIADRKARGEQSDDLLTQMLNGKDPETGEPLDDGNIRYQIITFLIAGHETTSGLLSFALYF |
| | LVKNPHVLQKVAEEAARVLVDPVPSYKQVKQLKYVGMVLNEALRLWPTAPAFSLYAKEDTVLGGEYPLE |
| | KGDEVMVLIPQLHRDKTVWGDDVEEFRPERFENPSAIPQHAFKPFGNGQRACIGQQFALHEATLVLGMM |
| | LKHFDFEDHTNYELDIKETATLKPKGFVVKAKSKKIPLGGIPSPSTEQSAKKVRKKAENAHNTPLLVLYGS |
| | NMGTAEGTARDLADIAMSKGFAPQVATLDSHAGNLPREGAVLIVTASYNGHPPDNAKQFVDWLDQASAD |
| | EVKGVRYSVFGCGDKNWATTYQKVPAFIDETLAAKGAENIADRGEADASDDFEGTYEEWREHMWSDVA |
| | AYFNLDIENSEDNKSTLSLQFVDSAADMPLAKMHGAFSTNVVASKELQQPGSARSTRHLEIELPKEASYQE |
| | GDHLGVIPRNYEGIVNRVTARFGLDASQQIRLEAEEEKLAHLPLAKTVSVEELLQYVELQDPVTRTQLRAM |
| | AAKTVCPPHKVELEALLEKQAYKEQVLAKRLTMLELLEKYPACEMKFSEFIALLPSIRPRYYSISSSPRVDE |
| | KQASITVSVVSGEAWSGYGEYKGIASNYLAELQEGDTITCFISTPQSEFTLPKDPETPLIMVGPGTGVAPFRG |
| | FVQARKQLKEQGQSLGEAHLYFGCRSPHEDYLYQEELENAQSEGIITLHTAFSRMPNQPKTYVQHVMEQD |
| | GKKLIELLDQGAHFYICGDGSQMAPAVEATLMKSYADVHQVSEADARLWLQQLEEKGRYAKDVWAG |
| 4H9 | MTIKEMPQPKTFGELKNLPLLNTDKPVQALMKIADELGEIFKFEAPGRVTRYLSSQRLIKEACDESRFDKN |
| | LSQALKFARDFAGDGLVTSWTHEKNWKKAHNILLPSFSQQAMKGYHAMMVDIAVQLVQKWERLNADE |
| | HIEVSEDMTRLTLDTIGLCGFNYRFNSFYRDQPHPFIISMVRAADEVMNKLQRANPDDPAYDENKRQFQE |
| | DIKVMNDLVDKIIADRKARGEQSDDLLTQMLNGKDPETGEPLDDGNIRYQIIAFLIAGHETTSGLLSFALYF |
| | LVKNPHVLQKVAEEAARVLVDPVPSYKQVKQLKYVGMVLNEALRLWPTAPAFSLYAKEDTVLGGEYPLE |
| | KGDEVMVLIPQLHRDKTVWGDDVEEFRPERFENPSAIPQHAFKPFGNGQRACIGQQFALHEATLVLGMM |
| | LKHFDFEDHTNYELDIKETATLKPKGFVVKAKSKKIPLGGIPSPSTEQSAKKVRKKAENAHNTPLLVLYGS |
| | NMGTAEGTARDLADIAMSKGFAPQVATLDSHAGNLPREGAVLIVTASYNGHPPDNAKQFVDWLDQASAD |
| | EVKGVRYSVFGCGDKNWATTYQKVPAFIDETLAAKGAENIADRGEADASDDFEGTYEEWREHMWSDVA |
| | AYFNLDIENSEDNKSTLSLQFVDSAADMPLAKMHGAFSTNVVASKELQQPGSARSTRHLEIELPKEASYQE |
| | GDHLGVIPRNYEGIVNRVTARFGLDASQQIRLEAEEEKLAHLPLAKTVSVEELLQYVELQDPVTRTQLRAM |
| | AAKTVCPPHKVELEALLEKQAYKEQVLAKRLTMLELLEKYPACEMKFSEFIALLPSIRPRYYSISSSPRVDE |
| | KQASITVSVVSGEAWSGYGEYKGIASNYLAELQEGDTITCFISTPQSEFTLPKDPETPLIMVGPGTGVAPFRG |
| | FVQARKQLKEQGQSLGEAHLYFGCRSPHEDYLYQEELENAQSEGIITLHTAFSRMPNQPKTYVQHVMEQD |
| | GKKLIELLDQGAHFYICGDGSQMAPAVEATLMKSVADVHQVSEADARLWLQQLEEKGRYAKDVVVAG |
| 8C7 | MTIKEMPQPKTFGELKNLPLLNTDKPVQALMKIADELGEIFKFEAPGRVTRYLSSQRLIKEACDESRFDKN |
| | LSQAAKFARDFAGDGLVTSWTHEKNVVKKAHNILLPSFSQQAMKGYHAMMVDIAVQLVQKWERLNADE |
| | HIEVSEDMTRLTLDTIGLCGFNYRFNSFYRDQPHPFIISMVRAADEVMNKLQRANPDDPAYDENKRQFQE |
| | DIKVMNDLVDKIIADRKARGEQSDDLLTQMLNGKDPETGEPLDDGNIRYQIITFLIAGHETTSGLLSFALYF |
| | LVKNPHVLQKVAEEAARVLVDPVPSYKQVKQLKYVGMVLNEALRLWPTAPAFSLYAKEDTVLGGEYPLE |
| | KGDEVMVLIPQLHRDKTVVVGDDVEEFRPERFENPSAIPQHAFKPFGNGQRACIGQQFALHEATLVLGMM |
| | LKHFDFEDHTNYELDIKETLTLKPKGFVVKAKSKKIPLGGIPSPSTEQSAKKVRKKAENAHNTPLLVLYGSN |
| | MGTAEGTARDLADIAMSKGFAPQVATLDSHAGNLPREGAVLIVTASYNGHPPDNAKQFVDWLDQASADE |
| | VKGVRYSVFGCGDKNWATTYQKVPAFIDETLAAKGAENIADRGEADASDDFEGTYEEWREHMWSDVAA |
| | YFNLDIENSEDNKSTLSLQFVDSAADMPLAKMHGAFSTNVVASKELQQPGSARSTRHLEIELPKEASYQEG |
| | DHLGVIPRNYEGIVNRVTARFGLDASQQIRLEAEEEKLAHLPLAKTVSVEELLQYVELQDPVTRTQLRAMA |
| | AKTVCPPHKVELEALLEKQAYKEQVLAKRLTMLELLEKYPACEMKFSEFIALLPSIRPRYYSISSSPRVDEK |
| | QASITVSVVSGEAWSGYGEYKGIASNYLAELQEGDTITCFISTPQSEFTLPKDPETPLIMVGPGTGVAPFRGF |
| | VQARKQLKEQGQSLGEAHLYFGCRSPHEDYLYQEELENAQSEGIITLHTAFSRMPNQPKTYVQHVMEQDG |
| | KKLIELLDQGAHFYICGDGSQMAPAVEATLMKSVADVHQVSEADARLWLQQLEEKGRYAKDVVVAG |
| 4H5 | MTIKEMPQPKTFGELKNLPLLNTDKPVQALMKIADELGEIFKFEAPGRVTRYLSSQRLIKEACDESRFDKN |
| | LSQAAKFARDFAGDGLVTSWTHEKNVVKKAHNILLPSFSQQAMKGYHAMMVDIAVQLVQKWERLNADE |
| | HIEVSEDMTRLTLDTIGLCGFNYRFNSFYRDQPHPFIISAVRAADEVMNKLQRANPDDPAYDENKRQFQE |
| | DIKVMNDLVDKIIADRKARGEQSDDLLTQMLNGKDPETGEPLDDGNIRYQIITFLIAGHETTSGLLSFALYF |
| | LVKNPHVLQKVAEEAARVLVDPVPSYKQVKQLKYVGMVLNEALRLWPTAPAFSLYAKEDTVLGGEYPLE |
| | KGDEVMVLIPQLHRDKTVVVGDDVEEFRPERFENPSAIPQHAFKPFGNGQRACIGQQFALHEATLVLGMM |
| | LKHFDFEDHTNYELDIKETLTLKPKGFVVKAKSKKIPLGGIPSPSTEQSAKKVRKKAENAHNTPLLVLYGSN |
| | MGTAEGTARDLADIAMSKGFAPQVATLDSHAGNLPREGAVLIVTASYNGHPPDNAKQFVDWLDQASADE |
| | VKGVRYSVFGCGDKNWATTYQKVPAFIDETLAAKGAENIADRGEADASDDFEGTYEEWREHMWSDVAA |
| | YFNLDIENSEDNKSTLSLQFVDSAADMPLAKMHGAFSTNVVASKELQQPGSARSTRHLEIELPKEASYQEG |
| | DHLGVIPRNYEGIVNRVTARFGLDASQQIRLEAEEEKLAHLPLAKTVSVEELLQYVELQDPVTRTQLRAMA |
| | AKTVCPPHKVELEALLEKQAYKEQVLAKRLTMLELLEKYPACEMKFSEFIALLPSIRPRYYSISSSPRVDEK |
| | QASITVSVVSGEAWSGYGEYKGIASNYLAELQEGDTITCFISTPQSEFTLPKDPETPLIMVGPGTGVAPFRGF |
| | VQARKQLKEQGQSLGEAHLYFGCRSPHEDYLYQEELENAQSEGIITLHTAFSRMPNQPKTYVQHVMEQDG |
| | KKLIELLDQGAHFYICGDGSQMAPAVEATLMKSVADVHQVSEADARLWLQQLEEKGRYAKDVVVAG |
| 7A1 | MTIKEMPQPKTFGELKNLPLLNTDKPVQALMKIADELGEIFKFEAPGRVTRYLSSQRLIKEACDESRFDKN |
| | LSQAAKFARDFAGDGLVTSWTHEKNVVKKAHNILLPSFSQQAMKGYHAMMVDIAVQLVQKWERLNADE |
| | HIEVSEDMTRLTLDTIGLCGFNYRFNSFYRDQPHPFIISAVRAADEVMNKLQRANPDDPAYDENKRQFQE |
| | DIKVMNDLVDKIIADRKARGEQSDDLLTQMLNGKDPETGEPLDDGNIRYQIIAFLIAGHETTSGLLSFALYF |
| | LVKNPHVLQKVAEEAARVLVDPVPSYKQVKQLKYVGMVLNEALRLWPTAPAFSLYAKEDTVLGGEYPLE |
| | KGDEVMVLIPQLHRDKTVVVGDDVEEFRPERFENPSAIPQHAFKPFGNGQRACIGQQFALHEATLVLGMM |
| | LKHFDFEDHTNYELDIKETLTLKPKGFVVKAKSKKIPLGGIPSPSTEQSAKKVRKKAENAHNTPLLVLYGSN |
| | MGTAEGTARDLADIAMSKGFAPQVATLDSHAGNLPREGAVLIVTASYNGHPPDNAKQFVDWLDQASADE |
| | VKGVRYSVFGCGDKNWATTYQKVPAFIDETLAAKGAENIADRGEADASDDFEGTYEEWREHMWSDVAA |
| | YFNLDIENSEDNKSTLSLQFVDSAADMPLAKMHGAFSTNVVASKELQQPGSARSTRHLEIELPKEASYQEG |
| | DHLGVIPRNYEGIVNRVTARFGLDASQQIRLEAEEEKLAHLPLAKTVSVEELLQYVELQDPVTRTQLRAMA |
| | AKTVCPPHKVELEALLEKQAYKEQVLAKRLTMLELLEKYPACEMKFSEFIALLPSIRPRYYSISSSPRVDEK |
| | QASITVSVVSGEAWSGYGEYKGIASNYLAELQEGDTITCFISTPQSEFTLPKDPETPLIMVGPGTGVAPFRGF |
| | VQARKQLKEQGQSLGEAHLYFGCRSPHEDYLYQEELENAQSEGIITLHTAFSRMPNQPKTYVQHVMEQDG |
| | KKLIELLDQGAHFYICGDGSQMAPAVEATLMKSVADVHQVSEADARLWLQQLEEKGRYAKDVVVAG |
| BM3 | |
| variant | Nucleotide Sequence |
| 8F11 | ATGACCATCAAAGAAATGCCACAACCTAAGACTTTCGGTGAATTGAAGAATTTGCCTTTGTTGAACACCG |
| | ATAAGCCAGTTCAAGCTTTGATGAAGATTGCTGATGAATTGGGTGAAATCTTCAAGTTTGAAGCTCCAG |
| | GTAGAGTCACTAGATACTTGTCATCTCAAAGATTGATCAAAGAAGCCTGCGACGAATCCAGATTTGATAA |
| | GAATTTGTCTCAAGCTTTGAAGTTCGCTAGAGATTTTGCTGGTGATGGTTTGGTTACTTCTTGGACTCAC |
| | GAAAAGAATTGGAAGAAGGCCCATAACATTTTGTTGCCATCTTTCTCACAACAAGCCATGAAGGGTTATC |
| | ATGCTATGATGGTTGATATCGCCGTTCAATTGGTTCAAAAGTGGGAAAGATTGAACGCCGATGAACATA |
| | TCGAAGTCTCTGAAGATATGACCAGATTGACCTTGGATACCATTGGTTTGTGTGGTTTCAACTACAGATT |
| | CAACTCCTTCTACAGAGATCAACCACATCCATTCATCATCTCTATGGTTAGAGCTTTGGATGAAGTCATG |
| | AACAAATTGCAAAGAGCTAATCCAGACGATCCAGCTTATGACGAAAACAAGAGACAATTCCAAGAAGAT |
| | ATCAAGGTCATGAACGATTTGGTCGATAAGATTATCGCTGATAGAAAGGCTAGAGGTGAACAATCTGAT |
| | GATTTGTTGACCCAAATGTTGAACGGTAAGGATCCAGAAACTGGTGAACCATTGGATGATGGTAACATC |
| | AGATACCAAATTATCACCTTCTTGATTGCTGGTCACGAAACTACATCTGGTTTGTTGTCTTTTGCCTTGT |
| | ACTTTTTGGTTAAGAACCCACACGTCTTGCAAAAGGTTGCTGAAGAAGCTGCAAGAGTTTTGGTTGATCC |
| | AGTTCCATCTTACAAGCAAGTCAAGCAATTGAAGTACGTTGGTATGGTTTTGAACGAAGCTTTGAGATT |
| | GTGGCCAACTGCTCCAGCTTTTTCATTATACGCTAAAGAAGATACCGTCTTGGGTGGTGAATATCCATTG |
| | GAAAAAGGTGATGAAGTTATGGTCTTGATCCCACAATTGCATAGAGATAAGACTGTTTGGGGTGATGAT |
| | GTCGAAGAATTCAGACCAGAAAGATTCGAAAACCCATCTGCTATTCCACAACATGCTTTTAAGCCATTTG |
| | GTAACGGTCAAAGAGCTTGCATTGGTCAACAATTCGCTTTACATGAAGCTACCTTGGTTTTGGGTATGAT |
| | GTTGAAACACTTCGACTTCGAAGATCACACCAACTACGAATTGGATATCAAAGAAACCGCTACCTTGAAG |
| | CCAAAGGGTTTTGTTGTTAAGGCTAAGTCCAAAAAGATTCCATTGGGTGGTATTCCATCTCCATCTACTG |
| | AACAATCCGCTAAGAAGGTTAGAAAGAAAGCTGAAAACGCTCATAACACACCTTTGTTGGTCTTGTACGG |
| | TTCTAATATGGGTACTGCTGAAGGTACAGCAAGAGATTTGGCAGATATTGCTATGTCTAAAGGTTTCGCT |
| | CCACAAGTTGCTACTTTGGATTCTCATGCTGGTAATTTGCCAAGAGAAGGTGCTGTTTTGATAGTTACTG |
| | CTTCTTACAATGGTCACCCACCAGATAATGCTAAGCAATTCGTTGATTGGTTGGATCAAGCTTCAGCTGA |
| | TGAAGTAAAAGGTGTTAGATACTCTGTTTTCGGTTGCGGTGACAAAAATTGGGCTACTACTTATCAAAA |
| | GGTTCCAGCCTTTATTGACGAAACTTTGGCTGCTAAAGGTGCTGAAAACATTGCTGACAGAGGTGAAGCT |
| | GATGCCTCCGACGACTTCGAAGGTACTTACGAAGAATGGAGAGAACACATGTGGTCTGACGTTGCTGCTT |
| | ACTTCAACTTGGACATCGAAAACTCTGAAGACAACAAGTCCACTTTGTCTTTGCAATTCGTTGACTCCGC |
| | TGCTGACATGCCATTGGCTAAGATGCACGGTGCTTTCTCTACCAACGTCGTTGCCTCCAAGGAATTGCAA |
| | CAACCAGGTTCTGCTAGATCTACTAGACACTTGGAAATCGAATTGCCAAAGGAAGCTTCCTACCAAGAAG |
| | GTGACCACTTGGGCGTTATTCCAAGAAACTACGAAGGTATCGTCAACAGAGTTACTGCTAGATTCGGTTT |
| | GGATGCTTCTCAACAAATCAGATTAGAAGCTGAAGAAGAAAAGTTGGCTCACTTGCCATTAGCTAAGAC |
| | TGTCTCCGTTGAAGAATTGTTGCAATACGTCGAATTGCAAGACCCAGTTACCAGAACCCAATTGAGAGCC |
| | ATGGCTGCCAAGACCGTCTGTCCACCACACAAGGTTGAATTGGAAGCCTTGTTGGAAAAGCAAGCCTACA |
| | AGGAACAAGTTTTGGCTAAGAGATTGACCATGTTGGAATTGTTGGAAAAGTACCCAGCCTGCGAAATGA |
| | AGTTCTCTGAATTTATCGCCTTGTTGCCATCTATCAGACCACGTTACTACTCTATTTCTTCCTCTCCACGT |
| | GTTGACGAAAAGCAAGCTTCTATTACTGTTTCCGTTGTCTCCGGTGAAGCTTGGTCCGGTTACGGTGAAT |
| | ACAAGGGTATTGCTTCTAACTACTTGGCTGAATTGCAAGAAGGTGACACCATTACTTGTTTCATCTCTAC |
| | TCCACAATCCGAATTTACTTTGCCAAAGGACCCAGAAACTCCATTGATCATGGTTGGTCCAGGTACTGGT |
| | GTCGCTCCATTCAGAGGTTTCGTTCAAGCTAGAAAACAATTGAAGGAACAAGGTCAATCTTTGGGTGAA |
| | GCTCACTTGTACTTCGGTTGTAGATCTCCACACGAAGACTACTTATACCAAGAAGAATTGGAAAACGCTC |
| | AATCCGAAGGTATTATCACTTTGCACACCGCTTTCTCCAGAATGCCAAACCAACCAAAGACTTACGTCCA |
| | ACACGTTATGGAACAAGACGGTAAGAAGTTGATTGAATTGTTGGACCAAGGTGCTCACTTCTACATTTGT |
| | GGTGATGGTTCTCAAATGGCTCCAGCCGTTGAAGCCACTTTGATGAAGTCTTACGCTGATGTTCACCAAG |
| | TTTCCGAAGCCGATGCTAGATTATGGTTGCAACAATTGGAAGAAAAAGGTCGTTACGCTAAGGATGTCT |
| | GGGCCGGTTGA |
| 4H9 | ATGACCATCAAAGAAATGCCACAACCTAAGACTTTCGGTGAATTGAAGAATTTGCCTTTGTTGAACACCG |
| | ATAAGCCAGTTCAAGCTTTGATGAAGATTGCTGATGAATTGGGTGAAATCTTCAAGTTTGAAGCTCCAG |
| | GTAGAGTCACTAGATACTTGTCATCTCAAAGATTGATCAAAGAAGCCTGCGACGAATCCAGATTTGATAA |
| | GAATTTGTCTCAAGCTTTGAAGTTCGCTAGAGATTTTGCTGGTGATGGTTTGGTTACTTCTTGGACTCAC |
| | GAAAAGAATTGGAAGAAGGCCCATAACATTTTGTTGCCATCTTTCTCACAACAAGCCATGAAGGGTTATC |
| | ATGCTATGATGGTTGATATCGCCGTTCAATTGGTTCAAAAGTGGGAAAGATTGAACGCCGATGAACATA |
| | TCGAAGTCTCTGAAGATATGACCAGATTGACCTTGGATACCATTGGTTTGTGTGGTTTCAACTACAGATT |
| | CAACTCCTTCTACAGAGATCAACCACATCCATTCATCATCTCTATGGTTAGAGCTGCAGATGAAGTCATG |
| | AACAAATTGCAAAGAGCTAATCCAGACGATCCAGCTTATGACGAAAACAAGAGACAATTCCAAGAAGAT |
| | ATCAAGGTCATGAACGATTTGGTCGATAAGATTATCGCTGATAGAAAGGCTAGAGGTGAACAATCTGAT |
| | GATTTGTTGACCCAAATGTTGAACGGTAAGGATCCAGAAACTGGTGAACCATTGGATGATGGTAACATC |
| | AGATACCAAATTATCGCTTTCTTGATTGCTGGTCACGAAACTACATCTGGTTTGTTGTCTTTTGCCTTGT |
| | ACTTTTTGGTTAAGAACCCACACGTCTTGCAAAAGGTTGCTGAAGAAGCTGCAAGAGTTTTGGTTGATCC |
| | AGTTCCATCTTACAAGCAAGTCAAGCAATTGAAGTACGTTGGTATGGTTTTGAACGAAGCTTTGAGATT |
| | GTGGCCAACTGCTCCAGCTTTTTCATTATACGCTAAAGAAGATACCGTCTTGGGTGGTGAATATCCATTG |
| | GAAAAAGGTGATGAAGTTATGGTCTTGATCCCACAATTGCATAGAGATAAGACTGTTTGGGGTGATGAT |
| | GTCGAAGAATTCAGACCAGAAAGATTCGAAAACCCATCTGCTATTCCACAACATGCTTTTAAGCCATTTG |
| | GTAACGGTCAAAGAGCTTGCATTGGTCAACAATTCGCTTTACATGAAGCTACCTTGGTTTTGGGTATGAT |
| | GTTGAAACACTTCGACTTCGAAGATCACACCAACTACGAATTGGATATCAAAGAAACCGCTACCTTGAAG |
| | CCAAAGGGTTTTGTTGTTAAGGCTAAGTCCAAAAAGATTCCATTGGGTGGTATTCCATCTCCATCTACTG |
| | AACAATCCGCTAAGAAGGTTAGAAAGAAAGCTGAAAACGCTCATAACACACCTTTGTTGGTCTTGTACGG |
| | TTCTAATATGGGTACTGCTGAAGGTACAGCAAGAGATTTGGCAGATATTGCTATGTCTAAAGGTTTCGCT |
| | CCACAAGTTGCTACTTTGGATTCTCATGCTGGTAATTTGCCAAGAGAAGGTGCTGTTTTGATAGTTACTG |
| | CTTCTTACAATGGTCACCCACCAGATAATGCTAAGCAATTCGTTGATTGGTTGGATCAAGCTTCAGCTGA |
| | TGAAGTAAAAGGTGTTAGATACTCTGTTTTCGGTTGCGGTGACAAAAATTGGGCTACTACTTATCAAAA |
| | GGTTCCAGCCTTTATTGACGAAACTTTGGCTGCTAAAGGTGCTGAAAACATTGCTGACAGAGGTGAAGCT |
| | GATGCCTCCGACGACTTCGAAGGTACTTACGAAGAATGGAGAGAACACATGTGGTCTGACGTTGCTGCTT |
| | ACTTCAACTTGGACATCGAAAACTCTGAAGACAACAAGTCCACTTTGTCTTTGCAATTCGTTGACTCCGC |
| | TGCTGACATGCCATTGGCTAAGATGCACGGTGCTTTCTCTACCAACGTCGTTGCCTCCAAGGAATTGCAA |
| | CAACCAGGTTCTGCTAGATCTACTAGACACTTGGAAATCGAATTGCCAAAGGAAGCTTCCTACCAAGAAG |
| | GTGACCACTTGGGCGTTATTCCAAGAAACTACGAAGGTATCGTCAACAGAGTTACTGCTAGATTCGGTTT |
| | GGATGCTTCTCAACAAATCAGATTAGAAGCTGAAGAAGAAAAGTTGGCTCACTTGCCATTAGCTAAGAC |
| | TGTCTCCGTTGAAGAATTGTTGCAATACGTCGAATTGCAAGACCCAGTTACCAGAACCCAATTGAGAGCC |
| | ATGGCTGCCAAGACCGTCTGTCCACCACACAAGGTTGAATTGGAAGCCTTGTTGGAAAAGCAAGCCTACA |
| | AGGAACAAGTTTTGGCTAAGAGATTGACCATGTTGGAATTGTTGGAAAAGTACCCAGCCTGCGAAATGA |
| | AGTTCTCTGAATTTATCGCCTTGTTGCCATCTATCAGACCACGTTACTACTCTATTTCTTCCTCTCCACGT |
| | GTTGACGAAAAGCAAGCTTCTATTACTGTTTCCGTTGTCTCCGGTGAAGCTTGGTCCGGTTACGGTGAAT |
| | ACAAGGGTATTGCTTCTAACTACTTGGCTGAATTGCAAGAAGGTGACACCATTACTTGTTTCATCTCTAC |
| | TCCACAATCCGAATTTACTTTGCCAAAGGACCCAGAAACTCCATTGATCATGGTTGGTCCAGGTACTGGT |
| | GTCGCTCCATTCAGAGGTTTCGTTCAAGCTAGAAAACAATTGAAGGAACAAGGTCAATCTTTGGGTGAA |
| | GCTCACTTGTACTTCGGTTGTAGATCTCCACACGAAGACTACTTATACCAAGAAGAATTGGAAAACGCTC |
| | AATCCGAAGGTATTATCACTTTGCACACCGCTTTCTCCAGAATGCCAAACCAACCAAAGACTTACGTCCA |
| | ACACGTTATGGAACAAGACGGTAAGAAGTTGATTGAATTGTTGGACCAAGGTGCTCACTTCTACATTTGT |
| | GGTGATGGTTCTCAAATGGCTCCAGCCGTTGAAGCCACTTTGATGAAGTCTTACGCTGATGTTCACCAAG |
| | TTTCCGAAGCCGATGCTAGATTATGGTTGCAACAATTGGAAGAAAAAGGTCGTTACGCTAAGGATGTCT |
| | GGGCCGGTTGA |
| 8C7 | ATGACCATCAAAGAAATGCCACAACCTAAGACTTTCGGTGAATTGAAGAATTTGCCTTTGTTGAACACCG |
| | ATAAGCCAGTTCAAGCTTTGATGAAGATTGCTGATGAATTGGGTGAAATCTTCAAGTTTGAAGCTCCAG |
| | GTAGAGTCACTAGATACTTGTCATCTCAAAGATTGATCAAAGAAGCCTGCGACGAATCCAGATTTGATAA |
| | GAATTTGTCTCAAGCTGCTAAGTTCGCTAGAGATTTTGCTGGTGATGGTTTGGTTACTTCTTGGACTCAC |
| | GAAAAGAATTGGAAGAAGGCCCATAACATTTTGTTGCCATCTTTCTCACAACAAGCCATGAAGGGTTATC |
| | ATGCTATGATGGTTGATATCGCCGTTCAATTGGTTCAAAAGTGGGAAAGATTGAACGCCGATGAACATA |
| | TCGAAGTCTCTGAAGATATGACCAGATTGACCTTGGATACCATTGGTTTGTGTGGTTTCAACTACAGATT |
| | CAACTCCTTCTACAGAGATCAACCACATCCATTCATCATCTCTATGGTTAGAGCTGCAGATGAAGTCATG |
| | AACAAATTGCAAAGAGCTAATCCAGACGATCCAGCTTATGACGAAAACAAGAGACAATTCCAAGAAGAT |
| | ATCAAGGTCATGAACGATTTGGTCGATAAGATTATCGCTGATAGAAAGGCTAGAGGTGAACAATCTGAT |
| | GATTTGTTGACCCAAATGTTGAACGGTAAGGATCCAGAAACTGGTGAACCATTGGATGATGGTAACATC |
| | AGATACCAAATTATCACCTTCTTGATTGCTGGTCACGAAACTACATCTGGTTTGTTGTCTTTTGCCTTGT |
| | ACTTTTTGGTTAAGAACCCACACGTCTTGCAAAAGGTTGCTGAAGAAGCTGCAAGAGTTTTGGTTGATCC |
| | AGTTCCATCTTACAAGCAAGTCAAGCAATTGAAGTACGTTGGTATGGTTTTGAACGAAGCTTTGAGATT |
| | GTGGCCAACTGCTCCAGCTTTTTCATTATACGCTAAAGAAGATACCGTCTTGGGTGGTGAATATCCATTG |
| | GAAAAAGGTGATGAAGTTATGGTCTTGATCCCACAATTGCATAGAGATAAGACTGTTTGGGGTGATGAT |
| | GTCGAAGAATTCAGACCAGAAAGATTCGAAAACCCATCTGCTATTCCACAACATGCTTTTAAGCCATTTG |
| | GTAACGGTCAAAGAGCTTGCATTGGTCAACAATTCGCTTTACATGAAGCTACCTTGGTTTTGGGTATGAT |
| | GTTGAAACACTTCGACTTCGAAGATCACACCAACTACGAATTGGATATCAAAGAAACCTTGACCTTGAAG |
| | CCAAAGGGTTTTGTTGTTAAGGCTAAGTCCAAAAAGATTCCATTGGGTGGTATTCCATCTCCATCTACTG |
| | AACAATCCGCTAAGAAGGTTAGAAAGAAAGCTGAAAACGCTCATAACACACCTTTGTTGGTCTTGTACGG |
| | TTCTAATATGGGTACTGCTGAAGGTACAGCAAGAGATTTGGCAGATATTGCTATGTCTAAAGGTTTCGCT |
| | CCACAAGTTGCTACTTTGGATTCTCATGCTGGTAATTTGCCAAGAGAAGGTGCTGTTTTGATAGTTACTG |
| | CTTCTTACAATGGTCACCCACCAGATAATGCTAAGCAATTCGTTGATTGGTTGGATCAAGCTTCAGCTGA |
| | TGAAGTAAAAGGTGTTAGATACTCTGTTTTCGGTTGCGGTGACAAAAATTGGGCTACTACTTATCAAAA |
| | GGTTCCAGCCTTTATTGACGAAACTTTGGCTGCTAAAGGTGCTGAAAACATTGCTGACAGAGGTGAAGCT |
| | GATGCCTCCGACGACTTCGAAGGTACTTACGAAGAATGGAGAGAACACATGTGGTCTGACGTTGCTGCTT |
| | ACTTCAACTTGGACATCGAAAACTCTGAAGACAACAAGTCCACTTTGTCTTTGCAATTCGTTGACTCCGC |
| | TGCTGACATGCCATTGGCTAAGATGCACGGTGCTTTCTCTACCAACGTCGTTGCCTCCAAGGAATTGCAA |
| | CAACCAGGTTCTGCTAGATCTACTAGACACTTGGAAATCGAATTGCCAAAGGAAGCTTCCTACCAAGAAG |
| | GTGACCACTTGGGCGTTATTCCAAGAAACTACGAAGGTATCGTCAACAGAGTTACTGCTAGATTCGGTTT |
| | GGATGCTTCTCAACAAATCAGATTAGAAGCTGAAGAAGAAAAGTTGGCTCACTTGCCATTAGCTAAGAC |
| | TGTCTCCGTTGAAGAATTGTTGCAATACGTCGAATTGCAAGACCCAGTTACCAGAACCCAATTGAGAGCC |
| | ATGGCTGCCAAGACCGTCTGTCCACCACACAAGGTTGAATTGGAAGCCTTGTTGGAAAAGCAAGCCTACA |
| | AGGAACAAGTTTTGGCTAAGAGATTGACCATGTTGGAATTGTTGGAAAAGTACCCAGCCTGCGAAATGA |
| | AGTTCTCTGAATTTATCGCCTTGTTGCCATCTATCAGACCACGTTACTACTCTATTTCTTCCTCTCCACGT |
| | GTTGACGAAAAGCAAGCTTCTATTACTGTTTCCGTTGTCTCCGGTGAAGCTTGGTCCGGTTACGGTGAAT |
| | ACAAGGGTATTGCTTCTAACTACTTGGCTGAATTGCAAGAAGGTGACACCATTACTTGTTTCATCTCTAC |
| | TCCACAATCCGAATTTACTTTGCCAAAGGACCCAGAAACTCCATTGATCATGGTTGGTCCAGGTACTGGT |
| | GTCGCTCCATTCAGAGGTTTCGTTCAAGCTAGAAAACAATTGAAGGAACAAGGTCAATCTTTGGGTGAA |
| | GCTCACTTGTACTTCGGTTGTAGATCTCCACACGAAGACTACTTATACCAAGAAGAATTGGAAAACGCTC |
| | AATCCGAAGGTATTATCACTTTGCACACCGCTTTCTCCAGAATGCCAAACCAACCAAAGACTTACGTCCA |
| | ACACGTTATGGAACAAGACGGTAAGAAGTTGATTGAATTGTTGGACCAAGGTGCTCACTTCTACATTTGT |
| | GGTGATGGTTCTCAAATGGCTCCAGCCGTTGAAGCCACTTTGATGAAGTCTTACGCTGATGTTCACCAAG |
| | TTTCCGAAGCCGATGCTAGATTATGGTTGCAACAATTGGAAGAAAAAGGTCGTTACGCTAAGGATGTCT |
| | GGGCCGGTTGA |
| 4H5 | ATGACCATCAAAGAAATGCCACAACCTAAGACTTTCGGTGAATTGAAGAATTTGCCTTTGTTGAACACCG |
| | ATAAGCCAGTTCAAGCTTTGATGAAGATTGCTGATGAATTGGGTGAAATCTTCAAGTTTGAAGCTCCAG |
| | GTAGAGTCACTAGATACTTGTCATCTCAAAGATTGATCAAAGAAGCCTGCGACGAATCCAGATTTGATAA |
| | GAATTTGTCTCAAGCTGCTAAGTTCGCTAGAGATTTTGCTGGTGATGGTTTGGTTACTTCTTGGACTCAC |
| | GAAAAGAATTGGAAGAAGGCCCATAACATTTTGTTGCCATCTTTCTCACAACAAGCCATGAAGGGTTATC |
| | ATGCTATGATGGTTGATATCGCCGTTCAATTGGTTCAAAAGTGGGAAAGATTGAACGCCGATGAACATA |
| | TCGAAGTCTCTGAAGATATGACCAGATTGACCTTGGATACCATTGGTTTGTGTGGTTTCAACTACAGATT |
| | CAACTCCTTCTACAGAGATCAACCACATCCATTCATCATCTCTGCTGTTAGAGCTGCAGATGAAGTCATG |
| | AACAAATTGCAAAGAGCTAATCCAGACGATCCAGCTTATGACGAAAACAAGAGACAATTCCAAGAAGAT |
| | ATCAAGGTCATGAACGATTTGGTCGATAAGATTATCGCTGATAGAAAGGCTAGAGGTGAACAATCTGAT |
| | GATTTGTTGACCCAAATGTTGAACGGTAAGGATCCAGAAACTGGTGAACCATTGGATGATGGTAACATC |
| | AGATACCAAATTATCACCTTCTTGATTGCTGGTCACGAAACTACATCTGGTTTGTTGTCTTTTGCCTTGT |
| | ACTTTTTGGTTAAGAACCCACACGTCTTGCAAAAGGTTGCTGAAGAAGCTGCAAGAGTTTTGGTTGATCC |
| | AGTTCCATCTTACAAGCAAGTCAAGCAATTGAAGTACGTTGGTATGGTTTTGAACGAAGCTTTGAGATT |
| | GTGGCCAACTGCTCCAGCTTTTTCATTATACGCTAAAGAAGATACCGTCTTGGGTGGTGAATATCCATTG |
| | GAAAAAGGTGATGAAGTTATGGTCTTGATCCCACAATTGCATAGAGATAAGACTGTTTGGGGTGATGAT |
| | GTCGAAGAATTCAGACCAGAAAGATTCGAAAACCCATCTGCTATTCCACAACATGCTTTTAAGCCATTTG |
| | GTAACGGTCAAAGAGCTTGCATTGGTCAACAATTCGCTTTACATGAAGCTACCTTGGTTTTGGGTATGAT |
| | GTTGAAACACTTCGACTTCGAAGATCACACCAACTACGAATTGGATATCAAAGAAACCTTGACCTTGAAG |
| | CCAAAGGGTTTTGTTGTTAAGGCTAAGTCCAAAAAGATTCCATTGGGTGGTATTCCATCTCCATCTACTG |
| | AACAATCCGCTAAGAAGGTTAGAAAGAAAGCTGAAAACGCTCATAACACACCTTTGTTGGTCTTGTACGG |
| | TTCTAATATGGGTACTGCTGAAGGTACAGCAAGAGATTTGGCAGATATTGCTATGTCTAAAGGTTTCGCT |
| | CCACAAGTTGCTACTTTGGATTCTCATGCTGGTAATTTGCCAAGAGAAGGTGCTGTTTTGATAGTTACTG |
| | CTTCTTACAATGGTCACCCACCAGATAATGCTAAGCAATTCGTTGATTGGTTGGATCAAGCTTCAGCTGA |
| | TGAAGTAAAAGGTGTTAGATACTCTGTTTTCGGTTGCGGTGACAAAAATTGGGCTACTACTTATCAAAA |
| | GGTTCCAGCCTTTATTGACGAAACTTTGGCTGCTAAAGGTGCTGAAAACATTGCTGACAGAGGTGAAGCT |
| | GATGCCTCCGACGACTTCGAAGGTACTTACGAAGAATGGAGAGAACACATGTGGTCTGACGTTGCTGCTT |
| | ACTTCAACTTGGACATCGAAAACTCTGAAGACAACAAGTCCACTTTGTCTTTGCAATTCGTTGACTCCGC |
| | TGCTGACATGCCATTGGCTAAGATGCACGGTGCTTTCTCTACCAACGTCGTTGCCTCCAAGGAATTGCAA |
| | CAACCAGGTTCTGCTAGATCTACTAGACACTTGGAAATCGAATTGCCAAAGGAAGCTTCCTACCAAGAAG |
| | GTGACCACTTGGGCGTTATTCCAAGAAACTACGAAGGTATCGTCAACAGAGTTACTGCTAGATTCGGTTT |
| | GGATGCTTCTCAACAAATCAGATTAGAAGCTGAAGAAGAAAAGTTGGCTCACTTGCCATTAGCTAAGAC |
| | TGTCTCCGTTGAAGAATTGTTGCAATACGTCGAATTGCAAGACCCAGTTACCAGAACCCAATTGAGAGCC |
| | ATGGCTGCCAAGACCGTCTGTCCACCACACAAGGTTGAATTGGAAGCCTTGTTGGAAAAGCAAGCCTACA |
| | AGGAACAAGTTTTGGCTAAGAGATTGACCATGTTGGAATTGTTGGAAAAGTACCCAGCCTGCGAAATGA |
| | AGTTCTCTGAATTTATCGCCTTGTTGCCATCTATCAGACCACGTTACTACTCTATTTCTTCCTCTCCACGT |
| | GTTGACGAAAAGCAAGCTTCTATTACTGTTTCCGTTGTCTCCGGTGAAGCTTGGTCCGGTTACGGTGAAT |
| | ACAAGGGTATTGCTTCTAACTACTTGGCTGAATTGCAAGAAGGTGACACCATTACTTGTTTCATCTCTAC |
| | TCCACAATCCGAATTTACTTTGCCAAAGGACCCAGAAACTCCATTGATCATGGTTGGTCCAGGTACTGGT |
| | GTCGCTCCATTCAGAGGTTTCGTTCAAGCTAGAAAACAATTGAAGGAACAAGGTCAATCTTTGGGTGAA |
| | GCTCACTTGTACTTCGGTTGTAGATCTCCACACGAAGACTACTTATACCAAGAAGAATTGGAAAACGCTC |
| | AATCCGAAGGTATTATCACTTTGCACACCGCTTTCTCCAGAATGCCAAACCAACCAAAGACTTACGTCCA |
| | ACACGTTATGGAACAAGACGGTAAGAAGTTGATTGAATTGTTGGACCAAGGTGCTCACTTCTACATTTGT |
| | GGTGATGGTTCTCAAATGGCTCCAGCCGTTGAAGCCACTTTGATGAAGTCTTACGCTGATGTTCACCAAG |
| | TTTCCGAAGCCGATGCTAGATTATGGTTGCAACAATTGGAAGAAAAAGGTCGTTACGCTAAGGATGTCT |
| | GGGCCGGTTGA |
| 7A1 | ATGACCATCAAAGAAATGCCACAACCTAAGACTTTCGGTGAATTGAAGAATTTGCCTTTGTTGAACACCG |
| | ATAAGCCAGTTCAAGCTTTGATGAAGATTGCTGATGAATTGGGTGAAATCTTCAAGTTTGAAGCTCCAG |
| | GTAGAGTCACTAGATACTTGTCATCTCAAAGATTGATCAAAGAAGCCTGCGACGAATCCAGATTTGATAA |
| | GAATTTGTCTCAAGCTGCTAAGTTCGCTAGAGATTTTGCTGGTGATGGTTTGGTTACTTCTTGGACTCAC |
| | GAAAAGAATTGGAAGAAGGCCCATAACATTTTGTTGCCATCTTTCTCACAACAAGCCATGAAGGGTTATC |
| | ATGCTATGATGGTTGATATCGCCGTTCAATTGGTTCAAAAGTGGGAAAGATTGAACGCCGATGAACATA |
| | TCGAAGTCTCTGAAGATATGACCAGATTGACCTTGGATACCATTGGTTTGTGTGGTTTCAACTACAGATT |
| | CAACTCCTTCTACAGAGATCAACCACATCCATTCATCATCTCTGCTGTTAGAGCTGCAGATGAAGTCATG |
| | AACAAATTGCAAAGAGCTAATCCAGACGATCCAGCTTATGACGAAAACAAGAGACAATTCCAAGAAGAT |
| | ATCAAGGTCATGAACGATTTGGTCGATAAGATTATCGCTGATAGAAAGGCTAGAGGTGAACAATCTGAT |
| | GATTTGTTGACCCAAATGTTGAACGGTAAGGATCCAGAAACTGGTGAACCATTGGATGATGGTAACATC |
| | AGATACCAAATTATCGCTTTCTTGATTGCTGGTCACGAAACTACATCTGGTTTGTTGTCTTTTGCCTTGT |
| | ACTTTTTGGTTAAGAACCCACACGTCTTGCAAAAGGTTGCTGAAGAAGCTGCAAGAGTTTTGGTTGATCC |
| | AGTTCCATCTTACAAGCAAGTCAAGCAATTGAAGTACGTTGGTATGGTTTTGAACGAAGCTTTGAGATT |
| | GTGGCCAACTGCTCCAGCTTTTTCATTATACGCTAAAGAAGATACCGTCTTGGGTGGTGAATATCCATTG |
| | GAAAAAGGTGATGAAGTTATGGTCTTGATCCCACAATTGCATAGAGATAAGACTGTTTGGGGTGATGAT |
| | GTCGAAGAATTCAGACCAGAAAGATTCGAAAACCCATCTGCTATTCCACAACATGCTTTTAAGCCATTTG |
| | GTAACGGTCAAAGAGCTTGCATTGGTCAACAATTCGCTTTACATGAAGCTACCTTGGTTTTGGGTATGAT |
| | GTTGAAACACTTCGACTTCGAAGATCACACCAACTACGAATTGGATATCAAAGAAACCTTGACCTTGAAG |
| | CCAAAGGGTTTTGTTGTTAAGGCTAAGTCCAAAAAGATTCCATTGGGTGGTATTCCATCTCCATCTACTG |
| | AACAATCCGCTAAGAAGGTTAGAAAGAAAGCTGAAAACGCTCATAACACACCTTTGTTGGTCTTGTACGG |
| | TTCTAATATGGGTACTGCTGAAGGTACAGCAAGAGATTTGGCAGATATTGCTATGTCTAAAGGTTTCGCT |
| | CCACAAGTTGCTACTTTGGATTCTCATGCTGGTAATTTGCCAAGAGAAGGTGCTGTTTTGATAGTTACTG |
| | CTTCTTACAATGGTCACCCACCAGATAATGCTAAGCAATTCGTTGATTGGTTGGATCAAGCTTCAGCTGA |
| | TGAAGTAAAAGGTGTTAGATACTCTGTTTTCGGTTGCGGTGACAAAAATTGGGCTACTACTTATCAAAA |
| | GGTTCCAGCCTTTATTGACGAAACTTTGGCTGCTAAAGGTGCTGAAAACATTGCTGACAGAGGTGAAGCT |
| | GATGCCTCCGACGACTTCGAAGGTACTTACGAAGAATGGAGAGAACACATGTGGTCTGACGTTGCTGCTT |
| | ACTTCAACTTGGACATCGAAAACTCTGAAGACAACAAGTCCACTTTGTCTTTGCAATTCGTTGACTCCGC |
| | TGCTGACATGCCATTGGCTAAGATGCACGGTGCTTTCTCTACCAACGTCGTTGCCTCCAAGGAATTGCAA |
| | CAACCAGGTTCTGCTAGATCTACTAGACACTTGGAAATCGAATTGCCAAAGGAAGCTTCCTACCAAGAAG |
| | GTGACCACTTGGGCGTTATTCCAAGAAACTACGAAGGTATCGTCAACAGAGTTACTGCTAGATTCGGTTT |
| | GGATGCTTCTCAACAAATCAGATTAGAAGCTGAAGAAGAAAAGTTGGCTCACTTGCCATTAGCTAAGAC |
| | TGTCTCCGTTGAAGAATTGTTGCAATACGTCGAATTGCAAGACCCAGTTACCAGAACCCAATTGAGAGCC |
| | ATGGCTGCCAAGACCGTCTGTCCACCACACAAGGTTGAATTGGAAGCCTTGTTGGAAAAGCAAGCCTACA |
| | AGGAACAAGTTTTGGCTAAGAGATTGACCATGTTGGAATTGTTGGAAAAGTACCCAGCCTGCGAAATGA |
| | AGTTCTCTGAATTTATCGCCTTGTTGCCATCTATCAGACCACGTTACTACTCTATTTCTTCCTCTCCACGT |
| | GTTGACGAAAAGCAAGCTTCTATTACTGTTTCCGTTGTCTCCGGTGAAGCTTGGTCCGGTTACGGTGAAT |
| | ACAAGGGTATTGCTTCTAACTACTTGGCTGAATTGCAAGAAGGTGACACCATTACTTGTTTCATCTCTAC |
| | TCCACAATCCGAATTTACTTTGCCAAAGGACCCAGAAACTCCATTGATCATGGTTGGTCCAGGTACTGGT |
| | GTCGCTCCATTCAGAGGTTTCGTTCAAGCTAGAAAACAATTGAAGGAACAAGGTCAATCTTTGGGTGAA |
| | GCTCACTTGTACTTCGGTTGTAGATCTCCACACGAAGACTACTTATACCAAGAAGAATTGGAAAACGCTC |
| | AATCCGAAGGTATTATCACTTTGCACACCGCTTTCTCCAGAATGCCAAACCAACCAAAGACTTACGTCCA |
| | ACACGTTATGGAACAAGACGGTAAGAAGTTGATTGAATTGTTGGACCAAGGTGCTCACTTCTACATTTGT |
| | GGTGATGGTTCTCAAATGGCTCCAGCCGTTGAAGCCACTTTGATGAAGTCTTACGCTGATGTTCACCAAG |
| | TTTCCGAAGCCGATGCTAGATTATGGTTGCAACAATTGGAAGAAAAAGGTCGTTACGCTAAGGATGTCT |
| | GGGCCGGTTGA |

TABLE 10
pA24, pA25, and pA26 sequences

| | |
|---|---|
| pA24 | cctcgccgcagttaattaaagtcagtgagcgaggaagcgcgtaactataacggtcctaaggtagcgaatcctgatgcggtattttctccttacgcatct |
| Sequence | gtgcggtatttcacaccgcatagatcggcaagtgcacaaacaatacttaaataaatactactcagtaataacctatttcttagcatttttgacgaaattt |
| | gctattttgttagagtcttttacaccatttgtctccacacctccgcttacatcaacaccaataacgccatttaatctaagcgcatcaccaacattttctggc |
| | gtcagtccaccagctaacataaaatgtaagctttcggggctctcttgccttccaacccagtcagaaatcgagttccaatccaaaagttcacctgtccca |
| | cctgcttctgaatcaaacaagggaataaacgaatgaggtttctgtgaagctgcactgagtagtatgttgcagtcttttggaaatacgagtcttttaataa |
| | ctggcaaaccgaggaactcttggtattcttgccacgactcatctccatgcagtggagccaatcaattcttgcggtcaactttggacgatatcaatgccgt |
| | aatcattgaccagagccaaaacatcctccttaagttgattacgaaacacgccaaccaagtatttcggagtgcctgaactatttttatatgcttttacaag |
| | acttgaaattttccttgcaataaccgggtcaattgttctctttctattgggcacacatataatacccagcaagtcagcatcggaatctagagcacattctg |
| | cggcctctgtgctctgcaagccgcaaactttcaccaatggaccagaactacctgtgaaattaataacagacatactccaagctgcctttgtgtgcttaat |
| | cacgtatactcacgtgctcaatagtcaccaatgccctccctcttggccctctccttttcttttttcgaccgaattaattcttaatcggcaaaaaaagaaaa |
| | gctccggatcaagattgtacgtaaggtgacaagctatttttcaataaagaatatcttccactactgccatctggcgtcataactgcaaagtacacatata |
| | ttacgatgctgttctattaaatgcttcctatattatatatatagtaatgtcgtgatctatggtgcactctcagtacaatctgctctgatgccgcatagttaag |
| | ccagccccgacacccgccaacacccgctgacgcgccctgacgggcttgtctgctcccggcatccgcttacagacaagctgtgaccgtctccgggagc |
| | tgcatgtgtcagaggttttcaccgtcatcaccgaaacgcgcgagacgaaagggcctcgtgatacgcctatttttataggttaatgtcatgataataatg |
| | gtttcttagacggatcgcttgcctgtaacttacacgcgcctcgtatcttttaatgatggaataatttgggaatttactctgtgtttatttatttttatgttttgt |
| | atttggattttagaaagtaaataaagaaggtagaagagttacggaatgaagaaaaaaaaataaacaaaggtttaaaaaatttcaacaaaaagcgta |
| | ctttacatatatatttattagacaagaaaagcagattaaatagatatacattcgattaacgataagtaaaatgtaaaatcacaggattttcgtgtgtggt |
| | cttctacacagacaaggtgaaacaattcggcattaatacctgagagcaggaagagcaagataaaaggtagtatttgttggcgatccccctagagtctt |
| | ttacatcttcggaaaacaaaaactattttttctttaatttctttttttactttctatttttaatttatatatttatattaaaaaatttaaattataattatttttata |
| | gcacgtgatgaaaaggacccaggtggcacttttcggggaaatgtgcgcggaacccctatttgtttatttttctaaatacattcaaatatgtatccgctca |
| | tgagacaataaccctgataaatgcttcaataatattgaaaaaggaagagtatgagtattcaacatttccgtgtcgcccttattcccttttttgcggcattt |
| | tgccttcctgtttttgctcacccagaaacgctggtgaaagtaaaagatgctgaagatcagttgggacgcgtagtctagaccagccaggacagaaatgc |
| | ctcgacttcgctgctacccaaggttgccgggtgacgcacaccgtggaaacggatgaaggcacgaacccagtggacataagcctgttcggttcgtaag |
| | ctgtaatgcaagtagcgtatgcgctcacgcaactggtccagaaccttgaccgaacgcagcggtggtaacggcgcagtggcggttttcatggcttgtta |
| | tgactgtttttttggggtacagtctatgcctcgggcatccaagcagcaagcgcgttacgccgtgggtcgatgtttgatgttatggagcagcaacgatgtt |
| | acgcagcagggcagtcgccctaaaacaaagttaaacattatgagggaagcggtgatcgccgaagtatcgactcaactatcagaggtagttggcgcc |
| | atcgagcgccatctcgaaccgacgttgctggccgtacatttgtacggctccgcagtggatggcggcctgaagccacacagtgatattgatttgctggtt |
| | acggtgaccgtaaggcttgatgaaacaacgcggcgagctttgatcaacgaccttttggaaacttcggcttcccctggagagagcgagattctccgcgc |
| | tgtagaagtcaccattgttgtgcacgacgacatcattccgtggcgttatccagctaagcgcgaactgcaatttggagaatggcagcgcaatgacattct |
| | tgcaggtatcttcgagccagccacgatcgacattgatctggctatcttgctgacaaaagcaagagaacatagcgttgccttggtaggtccagcggcgg |
| | aggaactctttgatccggttcctgaacaggatctatttgaggcgctaaatgaaaccttaacgctatggaactcgccgcccgactgggctggcgatgag |
| | cgaaatgtagtgcttacgttgtcccgcatttggtacagcgcagtaaccggcaaaatcgcgccgaaggatgtcgctgccggctgggcaatggagcgcc |
| | tgccggcccagtatcagcccgtcatacttgaagctagacaggcttatcttggacaagaagaagatcgcttggcctcgcgcgcagatcagttggaaga |
| | atttgtccactacgtgaaaggcgagatcaccaaggtagtcggcaaataaccctcgagcattcaaggcgccttgattatttgacgtggtttgatggcctc |
| | cacgcacgttgtgatatgtagatgattcagttcgagtttatcattatcaatactgccatttcaaagaatacgtaaataattaatagtagtgattttcctaac |
| | tttatttagtcaaaaaattagccttttaattctgctgtaacccgtacatgcccaaaatagggggcgggttacacagaatatataacatcgtaggtgtctg |
| | ggtgaacagtttattcctggcatccactaaatataatggagcccgctttttaagctggcatccagaaaaaaaaagaatcccagcaccaaaatattgttt |
| | tcttcaccaaccatcagttcataggtccattctcttagcgcaactacagagaacaggggcacaaacaggcaaaaaacgggcacaacctcaatggagt |
| | gatgcaacctgcctggagtaaatgatgacacaaggcaattgacccacgcatgtatctatctcattttcttacaccttctattaccttctgctctctctgatt |
| | tggaaaaagctgaaaaaaaaggttgaaaccagttccctgaaattattcccctacttgactaataagtatataaagacggtaggtattgattgtaattct |
| | gtaaatctatttcttaaacttcttaaattctacttttatagttagtcttttttttagttttaaaacaccaagaacttagtttcgaataaacacacataaacaa |
| | acaaaacaggccccttttcctttgtcgatatcatgtaattagttatgtcacgcttacattcacgccctcctcccacatccgctctaaccgaaaaggaagg |
| | agttagacaacctgaagtctaggtccctatttattttttttaatagttatgttagtattaagaacgttatttatatttcaaatttttcttttttttctgtacaaac |
| | gcgtgtacgcatgtaacattatactgaaaaccttgcttgagaaggttttgggacgctcgaaggctttaatttgtaatcattatcactttacgggtcctttcc |
| | ggtgatccgacaggttacggggcggcgacctcgcgggttttcgctatttatgaaaattttccggtttaaggcgtttccgttcttcttcgtcataacttaatg |
| | tttttatttaaaatacctcgcgagtggcaacactgaaaatacccatggagcggcgtaaccgtcgcacaggatctaggtgaagatcctttttgataatctc |
| | atgaccaaaatcccttaacgtgagttttcgttccactgagcgtcagaccccgtagaaaagatcaaaggatcttcttgagatcctttttttctgcgcgtaat |
| | ctgctgcttgcaaacaaaaaaaccaccgctaccagcggtggtttgtttgccggatcaagagctaccaactctttttccgaaggtaactggcttcagcag |
| | agcgcagataccaaatactgtccttctagtgtagccgtagttaggccaccacttcaagaactctgtagcaccgcctacatacctcgctctgctaatcctg |
| | ttaccagtggctgctgccagtggcgataagtcgtgtcttaccgggttggactcaagacgatagttaccggataaggcgcagcggtcgggctgaacgg |
| | ggggttcgtgcacacagcccagcttggagcgaacgacctacaccgaactgagatacctacagcgtgagctatgagaaagcgccacgcttcccgaag |
| | ggagaaaggcggacaggtatccggtaagcggcagggtcggaacaggagagcgcacgagggagcttccagggggaaacgcctggtatctttatagt |
| | cctgtcgggtttcgccacctctgacttgagcgtcgatttttgtgatgctcgtcaggggggcggagcctatggaaaaacgccagcaacgcggcagtgga |
| | acgtgcattatgaattagttacgctagggataacagggtaatatagaacccgaacgaccgagcgcagcggcggccgcgctgataccgccgc |
| pA25 | aacgacctacaccgaactgagatacctacagcgtgagctatgagaaagcgccacgcttcccgaagggagaaaggcggacaggtatccggtaagcg |
| sequence | gcagggtcggaacaggagagcgcacgagggagcttccagggggaaacgcctggtatctttatagtcctgtcgggtttcgccacctctgacttgagcg |
| | tcgatttttgtgatgctcgtcaggggggcggagcctatggaaaaacgccagcaacgcggcagtggaacgtgcattatgaattagttacgctagggata |
| | acagggtaatatagaacccgaacgaccgagcgcagcggcggccgcgctgataccgccgccctcgccgcagttaattaaagtcagtgagcgaggaa |
| | gcgcgtaactataacggtcctaaggtagcgaatcctgatgcggtattttctccttacgcatctgtgcggtatttcacaccgcatagatcggcaagtgcac |
| | aaacaatacttaaataaatactactcagtaataacctatttcttagcatttttgacgaaatttgctattttgttagagtcttttacaccatttgtctccacac |
| | ctccgcttacatcaacaccaataacgccatttaatctaagcgcatcaccaacattttctggcgtcagtccaccagctaacataaaatgtaagctttcggg |
| | gctctcttgccttccaacccagtcagaaatcgagttccaatccaaaagttcacctgtcccacctgcttctgaatcaaacaagggaataaacgaatgag |
| | gtttctgtgaagctgcactgagtagtatgttgcagtcttttggaaatacgagtcttttaataactggcaaaccgaggaactcttggtattcttgccacgac |
| | tcatctccatgcagtggagccaatcaattcttgcggtcaactttggacgatatcaatgccgtaatcattgaccagagccaaaacatcctccttaagttga |
| | ttacgaaacacgccaaccaagtatttcggagtgcctgaactatttttatatgcttttacaagacttgaaattttccttgcaataaccgggtcaattgttctc |
| | tttctattgggcacacatataatacccagcaagtcagcatcggaatctagagcacattctgcggcctctgtgctctgcaagccgcaaactttcaccaat |
| | ggaccagaactacctgtgaaattaataacagacatactccaagctgcctttgtgtgcttaatcacgtatactcacgtgctcaatagtcaccaatgccctc |
| | cctcttggccctctccttttcttttttcgaccgaattaattcttaatcggcaaaaaaagaaaagctccggatcaagattgtacgtaaggtgacaagctatt |
| | tttcaataaagaatatcttccactactgccatctggcgtcataactgcaaagtacacatatattacgatgctgttctattaaatgcttcctatattatatat |
| | atagtaatgtcgtgatctatggtgcactctcagtacaatctgctctgatgccgcatagttaagccagccccgacacccgccaacacccgctgacgcgcc |
| | ctgacgggcttgtctgctcccggcatccgcttacagacaagctgtgaccgtctccgggagctgcatgtgtcagaggttttcaccgtcatcaccgaaacg |
| | cgcgagacgaaagggcctcgtgatacgcctatttttataggttaatgtcatgataataatggtttcttagacggatcgcttgcctgtaacttacacgcgc |
| | ctcgtatcttttaatgatggaataatttgggaatttactctgtgtttatttatttttatgttttgtatttggattttagaaagtaaataaagaaggtagaaga |
| | gttacggaatgaagaaaaaaaaataaacaaaggtttaaaaaatttcaacaaaaagcgtactttacatatatatttattagacaagaaaagcagatta |
| | aatagatatacattcgattaacgataagtaaaatgtaaaatcacaggattttcgtgtgtggtcttctacacagacaaggtgaaacaattcggcattaat |
| | acctgagagcaggaagagcaagataaaaggtagtatttgttggcgatccccctagagtcttttacatcttcggaaaacaaaaactattttttctttaatt |
| | tctttttttactttctatttttaatttatatatttatattaaaaaatttaaattataattatttttatagcacgtgatgaaaaggacccaggtggcacttttcgg |
| | ggaaatgtgcgcggaacccctatttgtttatttttctaaatacattcaaatatgtatccgctcatgagacaataaccctgataaatgcttcaataatattg |
| | aaaaaggaagagtatgagtattcaacatttccgtgtcgcccttattcccttttttgcggcattttgccttcctgtttttgctcacccagaaacgctggtgaa |
| | agtaaaagatgctgaagatcagttgggacgcgtagtctagaccagccaggacagaaatgcctcgacttcgctgctacccaaggttgccgggtgacgc |
| | acaccgtggaaacggatgaaggcacgaacccagtggacataagcctgttcggttcgtaagctgtaatgcaagtagcgtatgcgctcacgcaactggt |
| | ccagaaccttgaccgaacgcagcggtggtaacggcgcagtggcggttttcatggcttgttatgactgtttttttggggtacagtctatgcctcgggcatc |
| | caagcagcaagcgcgttacgccgtgggtcgatgtttgatgttatggagcagcaacgatgttacgcagcagggcagtcgccctaaaacaaagttaaac |
| | attatgagggaagcggtgatcgccgaagtatcgactcaactatcagaggtagttggcgccatcgagcgccatctcgaaccgacgttgctggccgtac |
| | atttgtacggctccgcagtggatggcggcctgaagccacacagtgatattgatttgctggttacggtgaccgtaaggcttgatgaaacaacgcggcga |
| | gctttgatcaacgaccttttggaaacttcggcttcccctggagagagcgagattctccgcgctgtagaagtcaccattgttgtgcacgacgacatcattc |
| | cgtggcgttatccagctaagcgcgaactgcaatttggagaatggcagcgcaatgacattcttgcaggtatcttcgagccagccacgatcgacattgat |
| | ctggctatcttgctgacaaaagcaagagaacatagcgttgccttggtaggtccagcggcggaggaactctttgatccggttcctgaacaggatctattt |
| | gaggcgctaaatgaaaccttaacgctatggaactcgccgcccgactgggctggcgatgagcgaaatgtagtgcttacgttgtcccgcatttggtacag |
| | cgcagtaaccggcaaaatcgcgccgaaggatgtcgctgccggctgggcaatggagcgcctgccggcccagtatcagcccgtcatacttgaagctag |
| | acaggcttatcttggacaagaagaagatcgcttggcctcgcgcgcagatcagttggaagaatttgtccactacgtgaaaggcgagatcaccaaggta |
| | gtcggcaaataaccctcgagcattcaaggcgccttgattatttgacgtggtttgatggcctccacgcacgttgtgatatgtagatgagagcgttggttgg |
| | tggatcaagcccacgcgtaggcaatcctcgagcagatccgccaggcgtgtatatatagcgtggatggccaggcaactttagtgctgacacatacagg |
| | catatatatatgtgtgcgacaacacatgatcatatggcatgcatgtgctctgtatgtatataaaactcttgttttcttcttttctctaaatattctttccttata |
| | cattaggacctttgcagcataaattactatacttctatagacacacaaacacaaatacacacactaaattaataacaggccccttttcctttgtcgatat |
| | catgtaattagttatgtcacgcttacattcacgccctccccccacatccgctctaaccgaaaaggaaggagttagacaacctgaagtctaggtccctat |
| | ttatttttttatagttatgttagtattaagaacgttatttatatttcaaatttttcttttttttctgtacaaacgcgtgtacgcatgtaacattatactgaaaacc |
| | ttgcttgagaaggttttgggacgctcgaaggctttaatttgtaatcattatcactttacgggtcctttccggtgatccgacaggttacggggcggcgacct |
| | cgcgggttttcgctatttatgaaaattttccggtttaaggcgtttccgttcttcttcgtcataacttaatgtttttatttaaaatacctcgcgagtggcaaca |
| | ctgaaaatacccatggagcggcgtaaccgtcgcacaggatctaggtgaagatcctttttgataatctcatgaccaaaatcccttaacgtgagttttcgtt |
| | ccactgagcgtcagaccccgtagaaaagatcaaaggatcttcttgagatcctttttttctgcgcgtaatctgctgcttgcaaacaaaaaaaccaccgct |
| | accagcggtggtttgtttgccggatcaagagctaccaactctttttccgaaggtaactggcttcagcagagcgcagataccaaatactgtccttctagtg |
| | tagccgtagttaggccaccacttcaagaactctgtagcaccgcctacatacctcgctctgctaatcctgttaccagtggctgctgccagtggcgataagt |
| | cgtgtcttaccgggttggactcaagacgatagttaccggataaggcgcagcggtcgggctgaacggggggttcgtgcacacagcccagcttggagcg |
| pA26 | acgacctacaccgaactgagatacctacagcgtgagctatgagaaagcgccacgcttcccgaagggagaaaggcggacaggtatccggtaagcgg |
| sequence | cagggtcggaacaggagagcgcacgagggagcttccagggggaaacgcctggtatctttatagtcctgtcgggtttcgccacctctgacttgagcgtc |
| | gatttttgtgatgctcgtcaggggggcggagcctatggaaaaacgccagcaacgcggcagtggaacgtgcattatgaattagttacgctagggataa |
| | cagggtaatatagaacccgaacgaccgagcgcagcggcggccgcgctgataccgccgccctcgccgcagttaattaaagtcagtgagcgaggaag |
| | cgcgtaactataacggtcctaaggtagcgaatcctgatgcggtattttctccttacgcatctgtgcggtatttcacaccgcatagatcggcaagtgcaca |
| | aacaatacttaaataaatactactcagtaataacctatttcttagcatttttgacgaaatttgctattttgttagagtcttttacaccatttgtctccacacct |
| | ccgcttacatcaacaccaataacgccatttaatctaagcgcatcaccaacattttctggcgtcagtccaccagctaacataaaatgtaagctttcgggg |
| | ctctcttgccttccaacccagtcagaaatcgagttccaatccaaaagttcacctgtcccacctgcttctgaatcaaacaagggaataaacgaatgaggt |
| | ttctgtgaagctgcactgagtagtatgttgcagtcttttggaaatacgagtcttttaataactggcaaaccgaggaactcttggtattcttgccacgactc |
| | atctccatgcagtggagccaatcaattcttgcggtcaactttggacgatatcaatgccgtaatcattgaccagagccaaaacatcctccttaagttgatt |
| | acgaaacacgccaaccaagtatttcggagtgcctgaactatttttatatgcttttacaagacttgaaattttccttgcaataaccgggtcaattgttctctt |
| | tctattgggcacacatataatacccagcaagtcagcatcggaatctagagcacattctgcggcctctgtgctctgcaagccgcaaactttcaccaatgg |
| | accagaactacctgtgaaattaataacagacatactccaagctgcctttgtgtgcttaatcacgtatactcacgtgctcaatagtcaccaatgccctccc |
| | tcttggccctctccttttcttttttcgaccgaattaattcttaatcggcaaaaaaagaaaagctccggatcaagattgtacgtaaggtgacaagctattttt |
| | caataaagaatatcttccactactgccatctggcgtcataactgcaaagtacacatatattacgatgctgttctattaaatgcttcctatattatatatata |
| | gtaatgtcgtgatctatggtgcactctcagtacaatctgctctgatgccgcatagttaagccagccccgacacccgccaacacccgctgacgcgccctg |
| | acgggcttgtctgctcccggcatccgcttacagacaagctgtgaccgtctccgggagctgcatgtgtcagaggttttcaccgtcatcaccgaaacgcgc |
| | gagacgaaagggcctcgtgatacgcctatttttataggttaatgtcatgataataatggtttcttagacggatcgcttgcctgtaacttacacgcgcctc |
| | gtatcttttaatgatggaataatttgggaatttactctgtgtttatttatttttatgttttgtatttggattttagaaagtaaataaagaaggtagaagagtta |
| | cggaatgaagaaaaaaaaataaacaaaggtttaaaaaatttcaacaaaaagcgtactttacatatatatttattagacaagaaaagcagattaaata |
| | gatatacattcgattaacgataagtaaaatgtaaaatcacaggattttcgtgtgtggtcttctacacagacaaggtgaaacaattcggcattaatacct |
| | gagagcaggaagagcaagataaaaggtagtatttgttggcgatccccctagagtcttttacatcttcggaaaacaaaaactattttttctttaatttcttt |
| | ttttactttctatttttaatttatatatttatattaaaaaatttaaattataattatttttatagcacgtgatgaaaaggacccaggtggcacttttcggggaa |
| | atgtgcgcggaacccctatttgtttatttttctaaatacattcaaatatgtatccgctcatgagacaataaccctgataaatgcttcaataatattgaaaa |
| | aggaagagtatgagtattcaacatttccgtgtcgcccttattcccttttttgcggcattttgccttcctgtttttgctcacccagaaacgctggtgaaagta |
| | aaagatgctgaagatcagttgggacgcgtagtctagaccagccaggacagaaatgcctcgacttcgctgctacccaaggttgccgggtgacgcacac |
| | cgtggaaacggatgaaggcacgaacccagtggacataagcctgttcggttcgtaagctgtaatgcaagtagcgtatgcgctcacgcaactggtccag |
| | aaccttgaccgaacgcagcggtggtaacggcgcagtggcggttttcatggcttgttatgactgtttttttggggtacagtctatgcctcgggcatccaag |
| | cagcaagcgcgttacgccgtgggtcgatgtttgatgttatggagcagcaacgatgttacgcagcagggcagtcgccctaaaacaaagttaaacattat |
| | gagggaagcggtgatcgccgaagtatcgactcaactatcagaggtagttggcgccatcgagcgccatctcgaaccgacgttgctggccgtacatttgt |
| | acggctccgcagtggatggcggcctgaagccacacagtgatattgatttgctggttacggtgaccgtaaggcttgatgaaacaacgcggcgagctttg |
| | atcaacgaccttttggaaacttcggcttcccctggagagagcgagattctccgcgctgtagaagtcaccattgttgtgcacgacgacatcattccgtgg |
| | cgttatccagctaagcgcgaactgcaatttggagaatggcagcgcaatgacattcttgcaggtatcttcgagccagccacgatcgacattgatctggct |
| | atcttgctgacaaaagcaagagaacatagcgttgccttggtaggtccagcggcggaggaactctttgatccggttcctgaacaggatctatttgaggc |
| | gctaaatgaaaccttaacgctatggaactcgccgcccgactgggctggcgatgagcgaaatgtagtgcttacgttgtcccgcatttggtacagcgcag |
| | taaccggcaaaatcgcgccgaaggatgtcgctgccggctgggcaatggagcgcctgccggcccagtatcagcccgtcatacttgaagctagacagg |
| | cttatcttggacaagaagaagatcgcttggcctcgcgcgcagatcagttggaagaatttgtccactacgtgaaaggcgagatcaccaaggtagtcgg |
| | caaataaccctcgagcattcaaggcgccttgattatttgacgtggtttgatggcctccacgcacgttgtgatatgtagatgactcgtaggaacaatttcg |
| | ggcccctgcgtgttcttctgaggttcatcttttacatttgcttctgctggataattttcagaggcaacaaggaaaaattagatggcaaaaagtcgtctttc |
| | aaggaaaaatccccaccatctttcgagatcccctgtaacttattggcaactgaaagaatgaaaaggaggaaaatacaaaatatactagaactgaaa |
| | aaaaaaaagtataaatagagacgatatatgccaatacttcacaatgttcgaatctattcttcatttgcagctattgtaaaataataaaacatcaagaac |
| | aaacaagctcaacttgtcttttctaagaacaaagaataaacacaaaaacaaaaagtttttttaattttaatcaaaaaacaggccccttttcctttgtcga |
| | tatcatgtaattagttatgtcacgcttacattcacgccctccccccacatccgctctaaccgaaaaggaaggagttagacaacctgaagtctaggtccc |
| | tatttatttttttatagttatgttagtattaagaacgttatttatatttcaaatttttcttttttttctgtacaaacgcgtgtacgcatgtaacattatactgaaa |
| | accttgcttgagaaggttttgggacgctcgaaggctttaatttgtaatcattatcactttacgggtcctttccggtgatccgacaggttacggggcggcg |
| | acctcgcgggttttcgctatttatgaaaattttccggtttaaggcgtttccgttcttcttcgtcataacttaatgtttttatttaaaatacctcgcgagtggca |
| | acactgaaaatacccatggagcggcgtaaccgtcgcacaggatctaggtgaagatcctttttgataatctcatgaccaaaatcccttaacgtgagtttt |
| | cgttccactgagcgtcagaccccgtagaaaagatcaaaggatcttcttgagatcctttttttctgcgcgtaatctgctgcttgcaaacaaaaaaaccac |
| | cgctaccagcggtggtttgtttgccggatcaagagctaccaactctttttccgaaggtaactggcttcagcagagcgcagataccaaatactgtccttct |
| | agtgtagccgtagttaggccaccacttcaagaactctgtagcaccgcctacatacctcgctctgctaatcctgttaccagtggctgctgccagtggcgat |
| | aagtcgtgtcttaccgggttggactcaagacgatagttaccggataaggcgcagcggtcgggctgaacggggggttcgtgcacacagcccagcttgg |
| | agcga |

TABLE 11
Tailoring enzymes

| Reaction Catalyzed | Enzyme | Species |
|---|---|---|
| Carbon-carbon | Berberine bridge enzyme (BBE) | Ps, Ec, Cj, Bs, Tf |
| | Salutaridine synthase (SalSyn) | Ps |
| | Corytuberine synthase (CorSyn) | Cj |
| Oxidation | Tetrahydroproloberberine oxidase (STOX) | Cj, Am, Bw |
| | Dihydrobenzophenanthridine oxidase | Ps |
| | (DBOX) | |
| | Methylstylopine hydroxylase (MSH) | Ps |
| | Protopine 6-hydroxylase (P6H) | Ps, Ec |
| Methylenedioxy bridge | Stylopine synthase (StySyn) | Ps, Ec, Am |
| formation | Cheilanthifoline synthase (CheSyn) | Ps, Ec, Am |
| | Canadine synthase (CAS) | |
| O-methylation | Norcoclaurine 6-O-methyltransferase | Ps, Tf, Cj, Pb |
| | (6OMT) | |
| | 3′hydroxy-N-methylcoclaurine 4′-O- | Ps, Tf, Cj, Cc |
| | methyltransferase (4′OMT) | |
| | Reticuline 7-O-methyltransferase (7OMT) | Ps, Ec |
| | Scoulerine 9-O-methyltransferase (9OMT) | Ps, Tf, Cj, Cc |
| N-methylation | Coclaurine N-methyltransferase (CNMT) | Ps, Tf, Cj |
| | Tetrahydroprotoberberine N- | Ps, Ec, Pb |
| | methyltransferase (TMNT) | |
| O-demethylation | Thebaine demethylase (T6ODM) | Ps |
| | Codeine demethylase (CODM) | Ps, Ga |
| Reduction | Salutaridine reductase (SalR) | Ps, Pb, Ga |
| | Codeinone reductase (COR) | Ps |
| | Sanguinarine reductase (SanR) | Ec |
| Acetylation | Salutaridine acetyltransferase (SalAT) | Ps |

TABLE 12
Comparison of impurities that may be present in concentrate of poppy
straw and clarified yeast culture medium.

| | | Concentrate of | Clarified Yeast |
|---|---|---|---|
| Impuritites | | Poppy Straw | Culture Medium |
| | Sodium | √ | √ |
| | [symbol] | √ | √ |
| | Silicon | √ | * [symbol] |
| | Phosphorus | √ | √ |
| | [symbol] | √ | √ |
| | Chloride | √ | √ |
| | Potassium | √ | √ |
| | Calcium | √ | √ |
| | Copper | √ | √ |
| | Zinc | √ | √ |
| | [symbol] | √ | √ [symbol] |
| | Iron | √ | √ |
| | [symbol] | √ | √ |
| | [symbol] | √ | √ |
| | [symbol] | √ | √ |
| [symbol] | [symbol] | √ | * |
| | [symbol] | √ | * [symbol] |
| | [symbol] | √ | * |
| | [symbol] | √ | * |
| | [symbol] | √ | * |
| | [symbol] , gum and wax | √ | * |
| | [symbol] | √ | * |
| | [symbol] acid | √ | * |
| | [symbol] | √ | * |
| | [symbol] | √ | * |
| | [symbol] | √ | * |
| Other | Pesticide | √ | * |
| | Pollen | √ | * |

[symbol]

indicates data missing or illegible when filed

TABLE 13
Distinct groups of molecules present in clarified yeast culture medium (CYCM). Unlike
concentrate of poppy straw (CPS), yeast host strains may be engineered to produce molecules of a
predetermined class of alkaloids (i.e., only one biosynthesis pathway per strain) such that other classes of
alkaloids are not present. Therefore, the CYCM may contain molecules within a single biosynthesis
pathway including a subset of molecules spanning one or two columns, whereas the CPS may contain a
subset of molecules across many columns.

| [symbol] | [symbol] | [symbol] | [symbol] | [symbol] | [symbol] |
|---|---|---|---|---|---|
| [symbol] | [symbol] | [symbol] | [symbol] | [symbol] | [symbol] |

[symbol]

indicates data missing or illegible when filed

TABLE 14
Impurities that may be present in chemical synthesis preparations of compounds

| Compound | Impurities |
|---|---|
| Buprenorphine | 15,16-Dehydrobuprenorphine, 17,18-Dehydrobuprenorphine, 18,19- |
| | demethylbuprenorphine, 19,19’-Ethylbuprenorphine, 2,2’- |
| | Bisbuprenorphine, 3-Deshydroxybuprenorphine, 3-O- |
| | Methylbuprenorphine, 3-O-Methyl-N-cyanonorbuprenorphine, 3-O- |
| | Methyl-N-methylnorbuprenorphine, 6-O-Desmethylbuprenorphine, |
| | Buprenorphine N-oxide, N-But-3-enylnorbuprenorphine, N-But-3- |
| | enylnormethylbuprenorphine, N-Butylnorbuprenorphine, N- |
| | Methylbuprenorphine, Norbuprenorphine, Tetramethylfuran |
| | buprenorphine |
| Oxymorphone | 1-Bromooxymorphone, 6-Beta oxymorphol, 10-Alpha- |
| | hydroxyoxymorphone, 10-Ketooxymorphone, 2,2-Bisoxymorphone, |
| | Noroxymorphone, Oxymorphone N-oxide, 10-Hydroxyoxymorphone, |
| | 4-Hydroxyoxymorphone, 8-Hydroxyoxymorphone, Hydromorphinol. |
| Naltrexone | 10-Hydroxynaltrexone, 10-Ketonaltrexone, 14-Hydroxy-17- |
| | cyclopropylmethylnormorphinone, 2,2’-Bisnaltrexone, 3- |
| | Cyclopropylmethylnaltrexone, 3-O-Methylnaltrexone, 8- |
| | Hydroxynaltrexone, N-(3-Butenyl)-noroxymorphone, Naltrexone aldol |
| | dimer, N-Formyl-noroxymorphone |
| Naloxone | 10-Alpha-hydroxynaloxone, 10-Beta-hydroxynaloxone, 10- |
| | Ketonaloxone, 3-O-Allylnaloxone, 7,8-Didehydronaloxone, 2,2’- |
| | Bisnaloxone, Naloxone N-oxide |
| Nalbuphine | Beta-epimer of nalbuphine, 2,2’-Bisnalbuphine, 6-Ketonalbuphine, 10- |
| | Ketonalbuphine, Alpha-noroxymorphol, N-(Cyclobutylcarbonyl)- |
| | alpha-noroxymorphol, N-Formyl-6-alpha-noroxymophol. |

[0478] While preferred embodiments of the invention have been shown and described herein, it will be obvious to those skilled in the art that such embodiments are provided by way of example only. Numerous variations, changes, and substitutions will now occur to those skilled in the art without departing from the invention. It should be understood that various alternatives to the embodiments of the invention described herein may be employed in practicing the invention. It is intended that the following claims define the scope of the invention and that methods and structures within the scope of these claims and their equivalents be covered thereby.

The application's sequence listing, which the Patent Office published only in electronic form, follows.

SEQUENCE LISTING (195 sequences)

SEQ ID NO: 1 - protein, 901 aa, Papaver somniferum
MELQYISYFQPTSSVVALLLALVSILSSVVVLRKTFLNNYSSSPASSTKTAVLSHQRQQSCALPISGLLHIFMNKNGLIHVTLGNMADKYGPIFSFPTGSHRTLVVSSWEMVKECFTGNNDTAFSNRPIPLAFKTIFYACGGIDSYGLSSVPYGKYWRELRKVCVHNLLSNQQLLKFRHLIISQVDTSFNKLYELCKNSEDNHGNYTTTTTTAAGMVRIDDWLAELSFNVIGRIVCGFQSGPKTGAPSRVEQFKEAINEASYFMSTSPVSDNVPMLGWIDQLTGLTRNMKHCGKKLDLVVESIINDHRQKRRFSRTKGGDEKDDEQDDFIDICLSIMEQPQLPGNNNPSQIPIKSIVLDMIGGGTDTTKLTTIWTLSLLLNNPHVLDKAKQEVDAHFRTKRRSTNDAAAAVVDFDDIRNLVYIQAIIKESMRLYPASPVVERLSGEDCVVGGFHVPAGTRLWANVWKMQRDPKVWDDPLVFRPDRFLSDEQKMVDVRGQNYELLPFGAGRRVCPGVSFSLDLMQLVLTRLILEFEMKSPSGKVDMTATPGLMSYKVIPLDILLTHRRIKPCVQSAASERDMESSGVPVITLGSGKVMPVLGMGTFEKVGKGSERERLAILKAIEVGYRYFDTAAAYETEEVLGEAIAEALQLGLVKSRDELFISSMLWCTDAHADRVLLALQNSLRNLKLEYVDLYMLPFPASLKPGKITMDIPEEDICRMDYRSVWAAMEECQNLGFTKSIGVSNFSCKKLQELMATANIPPAVNQVEMSPAFQQKKLREYCNANNILVSAISVLGSNGTPWGSNAVLGSEVLKKIAMAKGKSVAQVSMRWVYEQGASLVVKSFSEERLRENLNIFDWELTKEDHEKIGEIPQCRILSAYFLVSPNGPFKSQEELWDDEA

SEQ ID NO: 2 - protein, 919 aa, Papaver somniferum
  MOD_RES (209)..(209): Any amino acid
  MOD_RES (226)..(226): Any amino acid
MELQYISYFQPTSSVVALLLALVSILSSVVVLRKTFLNNYSSSPASSTKTAVLSHQRQQSCALPISGLLHIFMNKNGLIHVTLGNMADKYGPIFSFPTGSHRTLVVSSWEMVKECFTGNNDTAFSNRPIPLAFKTIFYACGGIDSYGLSSVPYGKYWRELRKVCVHNLLSNQQLLKFRHLIISQVDTSFNKLYELCKNSEDNHGNYTTXLLLPQLAWRQPWKLYYXTTTTAAGMVRIDDWLAELSFNVIGRIVCGFQSGPKTGAPSRVEQFKEAINEASYFMSTSPVSDNVPMLGWIDQLTGLTRNMKHCGKKLDLVVESIINDHRQKRRFSRTKGGDEKDDEQDDFIDICLSIMEQPQLPGNNNPSQIPIKSIVLDMIGGGTDTTKLTTIWTLSLLLNNPHVLDKAKQEVDAHFRTKRRSTNDAAAAVVDFDDIRNLVYIQAIIKESMRLYPASPVVERLSGEDCVVGGFHVPAGTRLWANVWKMQRDPKVWDDPLVFRPDRFLSDEQKMVDVRGQNYELLPFGAGRRVCPGVSFSLDLMQLVLTRLILEFEMKSPSGKVDMTATPGLMSYKVIPLDILLTHRRIKPCVQSAASERDMESSGVPVITLGSGKVMPVLGMGTFEKVGKGSERERLAILKAIEVGYRYFDTAAAYETEEVLGEAIAEALQLGLVKSRDELFISSMLWCTDAHADRVLLALQNSLRNLKLEYVDLYMLPFPASLKPGKITMDIPEEDICRMDYRSVWAAMEECQNLGFTKSIGVSNFSCKKLQELMATANIPPAVNQVEMSPAFQQKKLREYCNANNILVSAISVLGSNGTPWGSNAVLGSEVLKKIAMAKGKSVAQVSMRWVYEQGASLVVKSFSEERLRENLNIFDWELTKEDHEKIGEIPQCRILSAYFLVSPNGPFKSQEELWDDEA

SEQ ID NO: 3 - protein, 732 aa, Papaver somniferum
  MOD_RES (725)..(725): Any amino acid
MELQYISYFQPTSSVVALLLALVSILSSVVVLRKTFLNNYSSSPASSTKTAVLSHQRQQSCALPISGLLHIFMNKNGLIHVTLGNMADKYGPIFSFPTGSHRTLVVSSWEMVKECFTGNNDTAFSNRPIPLAFKTIFYACGGIDSYGLSSVPYGKYWRELRKVCVHNLLSNQQLLKFRHLIISQVDTSFNKLYELCKNSEDNHGNYTTTTTTAAGMVRIDDWLAELSFNVIGRIVCGFQSGPKTGAPSRVEQFKEAINEASYFMSTSPVSDNVPMLGWIDQLTGLTRNMKHCGKKLDLVVESIINDHRQKRRFSRTKGGDEKDDEQDDFIDICLSIMEQPQLPGNNNPSQIPIKSIVLDMIGGGTDTTKLTTIWTLSLLLNNPHVLDKAKQEVDAHFRTKRRSTNDAAAAVVDFDDIRNLVYIQAIIKESMRLYPASPVVERLSGEDCVVGGFHVPAGTRLWANVWKMQRDPKVWDDPLVFRPDRFLSDEQKMVDVRGQNYELLPFGAGRRVCPGVSFSLDLMQLVLTRLILEFEMKSPSGKVDMTATPGLMSYKVIPLDILLTHRRIKPCVQSAASERDMESSGVPVITLGSGKVMPVLGMGTFEKVGKGSERERLAILKAIEVGYRYFDTAAAYETEEVLGEAIAEALQLGLVKSRDELFISSMLWCTDAHADRVLLALQNSLRNLKLEYVDLYMLPFPASLKPGKITMDIPEEDICRMDYRXVSKPWLH

SEQ ID NO: 4 - protein, 764 aa, Papaver somniferum
  MOD_RES (6)..(6): Any amino acid
MRWHRXIDSYGLSSVPYGKYWRELRKVCVHNLLSNQQLLKFRHLIISQVDTSFNKLYELCKNSEDNQGNYPTTTTAAGMVRIDDWLAELSFNVIGRIVCGFQSGPKTGAPSRVEQFKEAINEASYFMSTSPVSDNVPMLGWIDQLTGLTRNMKHCGKKLDLVVESIINDHRQKRRFSRTKGGDEKDDEQDDFIDICLSIMEQPQLPGNNNPSQIPIKSIVLDMIGGGTDTTKLTTIWTLSLLLNNPHVLDKAKQEVDAHFRTKRRSTNDAAAAVVDFDDIRNLVYIQAIIKESMRLYPASPVVERLSGEDCVVGGFHVPAGTRLWANVWKMQRDPKVWDDPLVFRPDRFLSDEQKMVDVRGQNYELLPFGAGRRVCPGVSFSLDLMQLVLTRLILEFEMKSPSGKVDMTATPGLMSYKVIPLDILLTHRRIKPCVQSAASERDMESSGVPVITLGSGKVMPVLGMGTFEKVGKGSERERLAILKAIEVGYRYFDTAAAYETEEVLGEAIAEALQLGLVKSRDELFISSMLWCTDAHADRVLLALQNSLRNLKLEYVDLYMLPFPASLKPGKITMDIPEEDICRMDYRSVWAAMEECQNLGFTKSIGVSNFSCKKLQELMATANIPPAVNQVEMSPAFQQKKLREYCNANNILVSAISVLGSNGTPWGSNAVLGSEVLKKIAMAKGKSVAQVSMRWVYEQGASLVVKSFSEERLRENLNIFDWELTKEDHEKIGEIPQCRILSAYFLVSPNGPFKSQEELWDDEA

SEQ ID NO: 5 - protein, 900 aa, Papaver setigerum
MELQYISYFQPTSSVVALLLALVSILSSVVVLRKTFLNNYSSSPASSTKTAVLSHQRQQSCALPISGLLHIFMNKNGLIHVTLGNMADKYGPIFSFPTGSHRTLVVSSWEMVKECFTGNNDTAFSNRPIPLAFKTIFYACGGIDSYGLSSVPYGKYWRELRKVCVHNLLSNQQLLKFRHLIISQVDTSFNKLYELCKNSEDNQGNYTTTTTAAGMVRIDDWLAELSFNVIGRIVCGFQSGPKTGAPSRVEQFKEAINEASYFMSTSPVSDNVPMLGWIDQLTGLTRNMKHCGKKLDLVVESIINDHRQKRRFSRTKGGDEKDDEQDDFIDICLSIMEQPQLPGNNNPSQIPIKSIVLDMIGGGTDTTKLTTIWTLSLLLNNPHVLDKAKQEVDAHFRTKRRSTNDAAAAVVDFDDIRNLVYIQAIIKESMRLYPASPVVERLSGEDCVVGGFHVPAGTRLWANVWKMQRDPKVWDDPLVFRPDRFLSDEQKMVDVRGQNYELLPFGAGRRVCPGVSFSLDLMQLVLTRLILEFEMKSPSGKVDMTATPGLMSYKVIPLDILLTHRRIKPCVQSAASERDMESSGVPVITLGSGKVMPVLGMGTFEKVGKGSERERLAILKAIEVGYRYFDTAAAYETEEVLGEAIAEALQLGLVKSRDELFISSMLWCTDAHADRVLLALQNSLRNLKLEYVDLYMLPFPASLKPGKITMDIPEEDICRMDYRSVWAAMEECQNLGFTKSIGVSNFSCKKLQELMATANIPPAVNQVEMSPAFQQKKLREYCNANNILVSAISVLGSNGTPWGSNAVLGSEVLKKIAMAKGKSVAQVSMRWVYEQGASLVVKSFSEERLRENLNIFDWELTKEDHEKIGEIPQCRILSAYFLVSPNGPFKSQEELWDDEA

SEQ ID NO: 6 - protein, 724 aa, Papaver setigerum
MELQYISYFQPTSSVVALLLALVSILSSVVVLRKTFLNNYSSSPASSTKTAVLSHQRQQSCALPISGLLHIFMNKNGLIHVTLGNMADKYGPIFSFPTGSHRTLVVSSWEMVKECFTGNNDTAFSNRPIPLAFKTIFYACGGIDSYGLSSVPYGKYWRELRKVCVHNLLSNQQLLKFRHLIISQVDTSFNKLYELCKNSEDNQGNYTTTTTAAGMVRIDDWLAELSFNVIGRIVCGFQSGPKTGAPSRVEQFKEAINEASYFMSTSPVSDNVPMLGWIDQLTGLTRNMKHCGKKLDLVVESIINDHRQKRRFSRTKGGDEKDDEQDDFIDICLSIMEQPQLPGNNNPSQIPIKSIVLDMIGGGTDTTKLTTIWTLSLLLNNPHVLDKAKQEVDAHFRTKRRSTNDAAAAVVDFDDIRNLVYIQALYPASPVVERLSGEDCVVGGFHVPAGTRLWANVWKMQRDPKVWDDPLVFRPDRFLSDEQKMVDVRGQNYELLPFGAGRRVCPGVSFSLDLMQLVLTRLILEFEMKSPSGKVDMTATPGLMSYKVIPLDILLTHRRIKPCVQSAASERDMESSGVPVITLGSGKVMPVLGMGTFEKVGKGSERERLAILKAIEVGYRYFDTAAAYETEEVLGEAIAEALQLGLVKSRDELFISSMLWCTDAHADRVLLALQNSLRNLKLEYVDLYMLPFPASLKPGKITMDIPEEDICRMDYRSVWAAMEE

SEQ ID NO: 7 - protein, 889 aa, Papaver bracteatum
MELQYFSYFQPTSSVVALLLALVSILFSVVVLRKTFSNNYSSPASSTETAVLCHQRQQSCALPISGLLHVFMNKNGLIHVTLGNMADKYGPIFSFPTGSHRTLVVSSWEMVKECFTGNNDTAFSNRPIPLAFQTIFYACGGIDSYGLSSVPYGKYWRELRKVCVHNLLSNQQLLKFRHLIISQVDTSFNKLYELCKNSEDNQGMVRMDDWLAQLSFNVIGRIVCGFQSDPKTGAPSRVEQFKEVINEASYFMSTSPVSDNVPMLGWIDQLTGLTRNMKHCGKKLDLVVESIIKDHRQKRRFSRTKGGDEKDDEQDDFIDICLSIMEQPQLPGNNSPPQIPIKSIVLDMIGGGTDTTKLTTIWTLSLLLNNPHVLDKAKQEVDAHFRKKRRSTDDAAAAVVDFDDIRNLVYIQAIIKESMRLYPASPVVERLSGEDCVVGGFHVPAGTRLWANVWKMQRDPKVWDDPLVFRPERFLSDEQKMVDVRGQNYELLPFGAGRRICPGVSFSLDLMQLVLTRLILEFEMKSPSGKVDMTATPGLMSYKVVPLDILLTHRRIKSCVQLASSERDMESSGVPVITLSSGKVMPVLGMGTFEKVGKGSERERLAILKAIEVGYRYFDTAAAYETEEVLGEAIAEALQLGLIESRDELFISSMLWCTDAHPDRVLLALQNSLRNLKLEYLDLYMLPFPASLKPGKITMDIPEEDICRMDYRSVWSAMEECQNLGFTKSIGVSNFSSKKLQELMATANIPPAVNQVEMSPAFQQKKLREYCNANNILVSAVSILGSNGTPWGSNAVLGSEVLKQIAMAKGKSVAQVSMRWVYEQGASLVVKSFSEERLRENLNIFDWELTKEDNEKIGEIPQCRILTAYFLVSPNGPFKSQEELWDDKA

SEQ ID NO: 8 - protein, 889 aa, Papaver bracteatum
MELQYFSYFQPTSSVVALLLALVSILFSVVVLRKTFSNNYSSPASSTETAVLCHQRQQSCALPISGLLHVFMNKNGLIHVTLGNMADKYGPIFSFPTGSHRTLVVSSWEMVKECFTGNNDTAFSNRPIPLAFQTIFYACGGIDSYGLSSVPYGKYWRELRKVCVHNLLSNQQLLKFRHLIISQVDTSFNKLYELCKNSEDNQGMVRMDDWLAQLSFNVIGRIVCGFQSDPKTGAPSRVEQFKEVINEASYFMSTSPVSDNVPMLGWIDQLTGLTRNMKHCGKKLDLVVESIIKDHRQKRRFSRTKGGDEKDDEQDDFIDICLSIMEQPQLPGNNSPPQIPIKSIVLDMIGGGTDTTKLTTIWTLSLLLNNPHVLDKAKQEVDAHFRKKRRSTDDAAAAVVDFDDIRNLVYIQAIIKESMRLYPASPVVERLSGEDCVVGGFHVPAGTRLWANVWKMQRDPKVWDDPLVFRPERFLSDEQKMVDVRGQNYELLPFGAGRRICPGVSFSLDLMQLVLTRLILEFEMKSPSGKVDMTATPGLMSYKVVPLDILLTHRRIKSCVQLASSERDMESSGVPVITLSSGKVMPVLGMGTFEKVGKGSERERLAILKAIEVGYRYFDTAAAYETEEVLGEAIAEALQLGLIESRDELFISSMLWCTDAHPDRVLLALQNSLRNLKLEYLDLYMLPFPASLKPGKITMDIPEEDICRMDYRSVWSAMEECQNLGFTKSIGVSNFSCKKLQELMATANIPPAVNQVEMSPAFQQKKLREYCNANNILVSAVSILGSNGTPWGSNAVLGSEVLKQIAMAKGKSVAQVSMRWVYEQGASLVVKSFSEERLRENLNIFDWELTKEDNEKIGEIPQCRILTAYFLVSPNGPFKSQEELWDDKA

SEQ ID NO: 9 - protein, 848 aa, Papaver bracteatum
SSPASSTETAVLCHQRQQSCALPISGLLHIFMNKNGLIHVTLGNMADKYGPIFSFPTGSHRILVVSSWEMVKECFTGNNDTAFSNRPIPLAFKTIFYACRGIDSYGLSSVPYGKYWRELRKVCVHNLLSNQQLLKFRHLIISQVDTSFNKLYELCKNSEDNQGMVRMDDWLAQLSFSVIGRIVCGFQSDPKTGAPSRVEQFKEAINEASYFMSTSPVSDNVPMLGWIDQLTGLTRNMTHCGKKLDLVVESIINDHRQKRRFSRTKGGDEKDDEQDDFIDICLSIMEQPQLPGNNNPPKIPIKSIVLDMIGAGTDTTKLTIIWTLSLLLNNPNVLAKAKQEVDAHFETKKRSTNEASVVVDFDDIGNLVYIQAIIKESMRLYPVSPVVERLSSEDCVVGGFHVPAGTRLWANVWKMQRDPKVWDDPLVFRPERFLSDEQKMVDVRGQNYELLPFGAGRRICPGVSFSLDLMQLVLTRLILEFEMKSPSGKVDMTATPGLMSYKVVPLDILLTHRRIKSCVQLASSERDMESSGVPVITLRSGKVMPVLGMGTFEKAGKGSERERLAILKAIEVGYRYFDTAAAYETEEVLGEAIAEALQLGLIKSRDELFISSMLWCTDAHPDRVLLALQNSLRNLKLEYVDLYMLPFPASLKPGKITMDIPEEDICPMDYRSVWSAMEECQNLGLTKSIGVSNFSCKKLEELMATANIPPAVNQVEMSPAFQQKKLREYCNANNILVSAVSILGSNGTPWGSNAVLGSEVLKKIAMAKGKSVAQVSMRWVYEQGASLVVKSFSEERLRENLNIFDWQLTKEDNEKIGEIPQCRILSAYFLVSPKGPFKSQEELWDDKA

SEQ ID NO: 10 - protein, 847 aa, Papaver bracteatum
SSPASSTETAVLCHQRQQSCALPISGLLHIFMNKNGLIHVTLGNMADKYGPIFSFPTGSHRILVVSSWEMVKECFTGNNDTFFSNRPIPLAFKIIFYAGGVDSYGLALVPYGKYWRELRKICVHNLLSNQQLLKFRHLIISQVDTSFNKLYELCKNSEDNQGMVRMDDWLAQLSFSVIGRIVCGFQSDPKTGAPSRVEQFKEAINEASYFMSTSPVSDNVPMLGWIDQLTGLTRNMTHCGKKLDLVVESIINDHRQKRRFSRTKGGDEKDDEQDDFIDICLSIMEQPQLPGNNNPPKIPIKSIVLDMIGGGTDTTKLTTIWTLSLLLNNPHVLDKAKQEVDAHFLTKRRSTNDAAVVDFDDIRNLVYIQAIIKESMRLYPASPVVERLSGEDCVVGGFHVPAGTRLWVNVWKMQRDPNVWADPMVFRPERFLSHGQKKMVDVRGKNYELLPFGAGRRICPGISFSLDLMQLVLTRLILEFEMKSPSGKVDMTATPGLMSYKVVPLDILLTHRRIKSCVQLASSERDMESSGVPVITLRSGKVMPVLGMGTFEKAGKGSERERLAILKAIEVGYRYFDTAAAYETEEVLGEAIAEALQLGLIKSRDELFISSMLWCTDAHPDRVLLALQNSLRNLKLEYVDLYMLPFPASLKPGKITMDIPEEDICPMDYRSVWSAMEECQNLGLTKSIGVSNFSCKKLEELMATANIPPAVNQVEMSPAFQQKKLREYCNANNILVSAVSILGSNGTPWGSNAVLGSEVLKKIAMAKGKSVAQVSMRWVYEQGASLVVKSFSEERLRENLNIFDWQLTKEDNEKIGEIPQCRILSAYFLVSPKGPFKSQEELWDDKA

SEQ ID NO: 11 - protein, 845 aa, Papaver bracteatum
SSPASSTETAVLCHQRQQSCALPISGLLHIFMNKNGLIHVTLGNMADKYGPIFSFPTGSHRILVVSSWEMVKECFTGNNDTFFSNRPIPLAFKIIFYAGGVDSYGLALVPYGKYWRELRKICVHNLLSNQQLLNFRHLIISQVDTSFNKLYDLSNKKKNTTTDSGTVRMDDWLAQLSFNVIGRIVCGFQTHTETSATSSVERFTEAIDEASRFMSIATVSDTFPWLGWIDQLTGLTRKMKHYGKKLDLVVESIIEDHRQNRRISGTKQGDDFIDICLSIMEQPQIIPGNNDPPRQIPIKSIVLDMIGGGTDTTKLTTTWTLSLLLNNPHVLEKAREEVDAHFGTKRRPTNDDAVMVEFDDIRNLVYIQAIIKESMRLYPASPVVERLSGEDCVVGGFHVPAGTRLWVNVWKMQRDPNVWADPMVFRPERFLSDEQKMVDVRGQNYELLPFGAGRRICPGVSFSLDLMQLVLTRLILEFEMKSPSGKVDMTATPGLMSYKVVPLDILLTHRRIKSCVQLASSERDMESSGVPVITLRSGKVMPVLGMGTFEKAGKGSERERLAILKAIEVGYRYFDTAAAYETEEVLGEAIAEALQLGLIKSRDELFISSMLWCTDAHPDRVLLALQNSLRNLKLEYVDLYMLPFPASLKPGKITMDIPEEDICPMDYRSVWSAMEECQNLGLTKSIGVSNFSCKKLEELMATANIPPAVNQVEMSPAFQQKKLREYCNANNILVSAVSILGSNGTPWGSNAVLGSEVLKKIAMAKGKSVAQVSMRWVYEQGASLVVKSFSEERLRENLNIFDWQLTKEDNEKIGEIPQCRILSAYFLVSPKGPFKSQEELWDDKA

SEQ ID NO: 12 - protein, 869 aa, Papaver bracteatum
VALRKKILKNYYSSSSSTATAVSHQWPKASRALPLIDLLHVFFNKTDLMHVTLGNMADKFGPIFSFPTGSHRTLVVSSWEKAKECFTGNNDIVFSGRPLPLAFKLIFYAGGIDSYGISQVPYGKKWRELRNICVHNILSNQQLLKFRHLMISQVDNSFNKLYEVCNSNKDEGDSATSTTAAGIVRMDDWLGKLAFDVIARIVCGFQSQTETSTTSSMERFTEAMDEASRFMSVTAVSDTVPWLGWIDQLTGLKRNMKHCGKKLNLVVKSIIEDHRQKRRLSSTKKGDENIIDEDEQDDFIDICLSIMEQPQLPGNNNPPKIPIKSIVLDMIGGGTDTTKLTTIWTLSLLLNNPHVLDKAKQEVDAHFLTKRRSTNDAAVVDFDDIRNLVYIQAIIKESMRLYPASPVVERLSGEDCVVGGFHVPAGTRLWVNVWKMQRDPNVWADPMVFRPERFLSDEQKMVDVRGQNYELLPFGAGRRICPGVSFSLDLMQLVLTRLILEFEMKSPSGKVDMTATPGLMSYKVVPLDILLTHRRIKSCVQLASSERDMESSGVPVITLRSGKVMPVLGMGTFEKAGKGSERERLAILKAIEVGYRYFDTAAAYETEEVLGEAIAEALQLGLIKSRDELFISSMLWCTDAHPDRVLLALQNSLRNLKLEYVDLYMLPFPASLKPGKITMDIPEEDICPMDYRSVWSAMEECQNLGLTKSIGVSNFSCKKLEELMATANIPPAVNQVEMSPAFQQKKLREYCNANNILVSAVSILGSNGTPWGSNAVLGSEVLKKIAMAKGKSVAQVSMRWVYEQGASLVVKSFSEERLRENLNIFDWQLTKEDNEKIGEIPQCRILSAYFLVSPKGPFKSQEELWDDKA

SEQ ID NO: 13 - protein, 858 aa, Papaver bracteatum
  MOD_RES (822)..(822): Any amino acid
MELQYFSYFQPTSSVVALLLALVSILFSVVVLRKTFSNNYSSPASSTETAVLCHQRQQSCALPISGLLHVFMNKNGLIHVTLGNMADKYGPIFSFPTGSHRTLVVSSWEMVKECFTGNNDTAFSNRPIPLAFQTIFYACGGIDSYGLSSVPYGKYWRELRKVCVHNLLSNQQLLKFRHLIISQVDTSFNKLYELCKNSEDNQGMVRMDDWLAQLSFNVIGRIVCGFQSDPKTGAPSRVEQFKEVINEASYFMSTSPVSDNVPMLGWIDQLTGLTRNMKHCGKKLDLVVESIIKDHRQKRRFSRTKGGDEKDDEQDDFIDICLSIMEQPQLPGNNSPPQIPIKSIVLDMIGGGTDTTKLTTIWTLSLLLNNPHVLDKAKQEVDAHFRKKRRSTDDAAAAVVDFDDIRNLVYIQAIIKESMRLYPASPVVERLSGEDCVVGGFHVPAGTRLWANVWKMQRDPKVWDDPLVFRPERFLSDEQKMVDVRGQNYELLPFGAGRRICPGVSFSLDLMQLVLTRLILEFEMKSPSGKVDMTATPGLMSYKVVPLDILLTHRRIKSCVQLASSERDMESSGVPVITLSSGKVMPVLGMGTFEKVGKGSERERLAILKAIEVGYRYFDTAAAYETEEVLGEAIAEALQLGLIESRDELFISSMLWCTDAHPDRVLLALQNSLRNLKLEYLDLYMLPFPASLKPGKITMDIPEEDICRMDYRSVWSAMEECQNLGFTKSIGVSNFSSKKLQELMATANIPPAVNQVEMSPAFQQKKLREYCNANNILVSAVSILGSNGTPWGSNAVLGSEVLKQIAMAKGKSVAQVSMRWVXKFSAYAIVWSLFFGHRICITLYSFLIRNVAYICITY

SEQ ID NO: 14 - protein, 716 aa, Papaver bracteatum
MELQYFSYFQPTSSVVALLLALVSILFSVVVLRKTFSNNYSSPASSTETAVLCHQRQQSCALPISGLLHVFMNKNGLIHVTLGNMADKYGPIFSFPTGSHRTLVVSSWEMVKECFTGNNDTAFSNRPIPLAFQTIFYACGGIDSYGLSSVPYGKYWRELRKVCVHNLLSNQQLLKFRHLIISQVDTSFNKLYELCKNSEDNQGMVRMDDWLAQLSFNVIGRIVCGFQSDPKTGAPSRVEQFKEVINEASYFMSTSPVSDNVPMLGWIDQLTGLTRNMKHCGKKLDLVVESIIKDHRQKRRFSRTKGGDEKDDEQDDFIDICLSIMEQPQLPGNNSPPQIPIKSIVLDMIGGGTDTTKLTTIWTLSLLLNNPHVLDKAKQEVDAHFRKKRRSTDDAAAAVVDFDDIRNLVYIQAIIKESMRLYPASPVVERLSGEDCVVGGFHVPAGTRLWANVWKMQRDPKVWDDPLVFRPERFLSDEQKMVDVRGQNYELLPFGAGRRICPGVSFSLDLMQLVLTRLILEFEMKSPSGKVDMTATPGLMSYKVVPLDILLTHRRIKSCVQLASSERDMESSGVPVITLSSGKVMPVLGMGTFEKVGKGSERERLAILKAIEVGYRYFDTAAAYETEEVLGEAIAEALQLGLIESRDELFISSMLWCTDAHPDRVLLALQNSLRQVFLMQIRLIYICTYQQVHLNIYFQINEFVLCDMYRNLKLEY

SEQ ID NO: 15 - protein, 864 aa, Chelidonium majus
LNNYSSSPASSTKTAVLSHQRQQSCALPISGLLHIFMNKNGLIHVTLGNMADKYGPIFSFPTGSHRTLVVSSWEMVKECFTGNNDTAFSNRPIPLAFKTIFYACGGIDSYGLSSVPYGKYWRELRKVCVHNLLSNQQLLKFRHLIISQVDTSFNKLYELCKNSEDNQGNYPTTTTAAGMVRIDDWLAELSFNVIGRIVCGFQSGPKTGAPSRVEQFKEAINEASYFMSTSPVSDNVPMLGWIDQLTGLTRNMKHCGKKLDLVVESIINDHRQKRRFSRTKGGDEKDDEQDDFIDICLSIMEQPQLPGNNNPSQIPIKSIVLDMIGGGTDTTKLTTIWTLSLLLNNPHVLDKAKQEVDAHFRTKRRSTNDAAAAVVDFDDIRNLVYIQAIIKESMRLYPASPVVERLSGEDCVVGGFHVPAGTRLWANVWKMQRDPKVWDDPLVFRPDRFLSDEQKMVDVRGQNYELLPFGAGRRVCPGVSFSLDLMQLVLTRLILEFEMKSPSGKVDMTATPGLMSYKVIPLDILLTHRRIKPCVQSAASERDMESSGVPVITLGSGKVMPVLGMGTFEKVGKGSERERLAFLKAIEVGYRYFDTAAAYETEEFLGEAIAEALQLGLIKSRDELFITSKLWPCDAHPDLVVPALQNSLRNLKLEYVDLYMLPFPASLKPGKITMDIPEEDICRMDYRSVWAAMEECQNLGFTKSIGVSNFSCKKLQELMATANIPPAVNQVEMSPAFQQKKLREYCNANNILVSAISVLGSNGTPWGSNAVLGSEVLKKIAMAKGKSVAQVSMRWVYEQGASLVVKSFSEERLRENLNIFDWELTKEDHEKIGEIPQCRILSAYFLVSPNGPFKSQEELWDDEA

SEQ ID NO: 16 - protein, 889 aa, Artificial Sequence; identical to SEQ ID NO: 8
  Description of Artificial Sequence: Synthetic polypeptide

SEQ ID NO: 17 - protein, 568 aa, Artificial Sequence
  Description of Artificial Sequence: Synthetic polypeptide
MELQYFSYFQPTSSVVALLLALVSILFSVVVLRKTFSNNYSSPASSTETAVLCHQRQQSCALPISGLLHVFMNKNGLIHVTLGNMADKYGPIFSFPTGSHRTLVVSSWEMVKECFTGNNDTAFSNRPIPLAFQTIFYACGGIDSYGLSSVPYGKYWRELRKVCVHNLLSNQQLLKFRHLIISQVDTSFNKLYELCKNSEDNQGMVRMDDWLAQLSFNVIGRIVCGFQSDPKTGAPSRVEQFKEVINEASYFMSTSPVSDNVPMLGWIDQLTGLTRNMKHCGKKLDLVVESIIKDHRQKRRFSRTKGGDEKDDEQDDFIDICLSIMEQPQLPGNNSPPQIPIKSIVLDMIGGGTDTTKLTTIWTLSLLLNNPHVLDKAKQEVDAHFRKKRRSTDDAAAAVVDFDDIRNLVYIQAIIKESMRLYPASPVVERLSGEDCVVGGFHVPAGTRLWANVWKMQRDPKVWDDPLVFRPERFLSDEQKMVDVRGQNYELLPFGAGRRICPGVSFSLDLMQLVLTRLILEFEMKSPSGKVDMTATPGLMSYKVVPLDILLTHRRIKSCVQLASSERD

SEQ ID NO: 18 - protein, 321 aa, Artificial Sequence
  Description of Artificial Sequence: Synthetic polypeptide
MESSGVPVITLSSGKVMPVLGMGTFEKVGKGSERERLAILKAIEVGYRYFDTAAAYETEEVLGEAIAEALQLGLIESRDELFISSMLWCTDAHPDRVLLALQNSLRNLKLEYLDLYMLPFPASLKPGKITMDIPEEDICRMDYRSVWSAMEECQNLGFTKSIGVSNFSCKKLQELMATANIPPAVNQVEMSPAFQQKKLREYCNANNILVSAVSILGSNGTPWGSNAVLGSEVLKQIAMAKGKSVAQVSMRWVYEQGASLVVKSFSEERLRENLNIFDWELTKEDNEKIGEIPQCRILTAYFLVSPNGPFKSQEELWDDKA

SEQ ID NO: 19 - DNA, 682 bp, Saccharomyces cerevisiae
ttcagttcgagtttatcattatcaatactgccatttcaaagaatacgtaaataattaatagtagtgattttcctaactttatttagtcaaaaaattagccttttaattctgctgtaacccgtacatgcccaaaatagggggcgggttacacagaatatataacatcgtaggtgtctgggtgaacagtttattcctggcatccactaaatataatggagcccgctttttaagctggcatccagaaaaaaaaagaatcccagcaccaaaatattgttttcttcaccaaccatcagttcataggtccattctcttagcgcaactacagagaacaggggcacaaacaggcaaaaaacgggcacaacctcaatggagtgatgcaacctgcctggagtaaatgatgacacaaggcaattgacccacgcatgtatctatctcattttcttacaccttctattaccttctgctctctctgatttggaaaaagctgaaaaaaaaggttgaaaccagttccctgaaattattcccctacttgactaataagtatataaagacggtaggtattgattgtaattctgtaaatctatttcttaaacttcttaaattctacttttatagttagtcttttttttagttttaaaacaccaagaacttagtttcgaataaacacacataaacaaacaaa

SEQ ID NO: 20 - DNA, 289 bp, Saccharomyces cerevisiae
gagcgttggttggtggatcaagcccacgcgtaggcaatcctcgagcagatccgccaggcgtgtatatatagcgtggatggccaggcaactttagtgctgacacatacaggcatatatatatgtgtgcgacgacacatgatcatatggcatgcatgtgctctgtatgtatataaaactcttgttttcttcttttctctaaatattctttccttatacattaggacctttgcagcataaattactatacttctatagacacacaaacacaaatacacacactaaattaata

SEQ ID NO: 21 - DNA, 413 bp, Saccharomyces cerevisiae
catagcttcaaaatgtttctactccttttttactcttccagattttctcggactccgcgcatcgccgtaccacttcaaaacacccaagcacagcatactaaatttcccctctttcttcctctagggtgtcgttaattacccgtactaaaggtttggaaaagaaaaaagagaccgcctcgtttctttttcttcgtcgaaaaaggcaataaaaatttttatcacgtttctttttcttgaaaatttttttttttgatttttttctctttcgatgacctcccattgatatttaagttaataaacggtcttcaatttctcaagtttcagtttcatttttcttgttctattacaactttttttacttcttgctcattagaaagaaagcatagcaatctaatctaagttttaattacaaa

SEQ ID NO: 22 - DNA, 274 bp, Saccharomyces cerevisiae
acaggccccttttcctttgtcgatatcatgtaattagttatgtcacgcttacattcacgccctcctcccacatccgctctaaccgaaaaggaaggagttagacaacctgaagtctaggtccctatttattttttttaatagttatgttagtattaagaacgttatttatatttcaaatttttcttttttttctgtacaaacgcgtgtacgcatgtaacattatactgaaaaccttgcttgagaaggttttgggacgctcgaaggctttaatttg

SEQ ID NO: 23 - DNA, 150 bp, Saccharomyces cerevisiae
gcgaatttcttatgatttatgatttttattattaaataagttataaaaaaaataagtgtatacaaattttaaagtgactcttaggttttaaaacgaaaattcttattcttgagtaactctttcctgtaggtcaggttgctttctcaggta

SEQ ID NO: 24 - DNA, 8014 bp, Artificial Sequence
  Description of Artificial Sequence: Synthetic polynucleotide
cctcgccgcagttaattaaagtcagtgagcgaggaagcgcgtaactataacggtcctaaggtagcgaatcctgatgcggtattttctccttacgcatctgtgcggtatttcacaccgcatagatcggcaagtgcacaaacaatacttaaataaatactactcagtaataacctatttcttagcatttttgacgaaatttgctattttgttagagtcttttacaccatttgtctccacacctccgcttacatcaacaccaataacgccatttaatctaagcgcatcaccaacattttctggcgtcagtccaccagctaacataaaatgtaagctttcggggctctcttgccttccaacccagtcagaaatcgagttccaatccaaaagttcacctgtcccacctgcttctgaatcaaacaagggaataaacgaatgaggtttctgtgaagctgcactgagtagtatgttgcagtcttttggaaatacgagtcttttaataactggcaaaccgaggaactcttggtattcttgccacgactcatctccatgcagttggacgatatcaatgccgtaatcattgaccagagccaaaacatcctccttaagttgattacgaaacacgccaaccaagtatttcggagtgcctgaactatttttatatgcttttacaagacttgaaattttccttgcaataaccgggtcaattgttctctttctattgggcacacatataatacccagcaagtcagcatcggaatctagagcacattctgcggcctctgtgctctgcaagccgcaaactttcaccaatggaccagaactacctgtgaaattaataacagacatactccaagctgcctttgtgtgcttaatcacgtatactcacgtgctcaatagtcaccaatgccctccctcttggccctctccttttcttttttcgaccgaattaattcttaatcggcaaaaaaagaaaagctccggatcaagattgtacgtaaggtgacaagctatttttcaataaagaatatcttccactactgccatctggcgtcataactgcaaagtacacatatattacgatgctgttctattaaatgcttcctatattatatatatagtaatgtcgtgatctatggtgcactctcagtacaatctgctctgatgccgcatagttaagccagccccgacacccgccaacacccgctgacgcgccctgacgggcttgtctgctcccggcatccgcttacagacaagctgtgaccgtctccgggagctgcatgtgtcagaggttttcaccgtcatcaccgaaacgcgcgagacgaaagggcctcgtgatacgcctatttttataggttaatgtcatgataataatggtttcttagacggatcgcttgcctgtaacttacacgcgcctcgtatcttttaatgatggaataatttgggaatttactctgtgtttatttatttttatgttttgtatttggattttagaaagtaaataaagaaggtagaagagttacggaatgaagaaaaaaaaataaacaaaggtttaaaaaatttcaacaaaaagcgtactttacatatatatttattagacaagaaaagcagattaaatagatatacattcgattaacgataagtaaaatgtaaaatcacaggattttcgtgtgtggtcttctacacagacaaggtgaaacaattcggcattaatacctgagagcaggaagagcaagataaaaggtagtatttgttggcgatccccctagagtcttttacatcttcggaaaacaaaaactattttttctttaatttctttttttactttctatttttaatttatatatttatattaaaaaatttaaattataattatttttatagcacgtgatgaaaaggacccaggtggcacttttcggggaaatgtgcgcggaacccctatttgtttatttttctaaatacattcaaatatgtatccgctcatgagacaataaccctgataaatgcttcaataatattgaaaaaggaagagtatgagtattcaacatttccgtgtcgcccttattcccttttttgcggcattttgccttcctgtttttgctcacccagaaacgctggtgaaagtaaaagatgctgaagatcagttgggacgcgtagtctagaccagccaggacagaaatgcctcgacttcgctgctacccaaggttgccgggtgacgcacaccgtggaaacggatgaaggcacgaacccagtggacataagcctgttcggttcgtaagctgtaatgcaagtagcgtatgcgctcacgcaactggtccagaaccttgaccgaacgcagcggtggtaacggcgcagtggcggttttcatggcttgttatgactgtttttttggggtacagtctatgcctcgggcatccaagcagcaagcgcgttacgccgtgggtcgatgtttgatgttatggagcagcaacgatgttacgcagcagggcagtcgccctaaaacaaagttaaacattatgagggaagcggtgatcgccgaagtatcgactcaactatcagaggtagttggcgccatcgagcgccatctcgaaccgacgttgctggccgtacatttgtacggctccgcagtggatggcggcctgaagccacacagtgatattgatttgctggttacggtgaccgtaaggcttgatgaaacaacgcggcgagctttgatcaacgaccttttggaaacttcggcttcccctggagagagcgagattctccgcgctgtagaagtcaccattgttgtgcacgacgacatcattccgtggcgttatccagctaagcgcgaactgcaatttggagaatggcagcgcaatgacattcttgcaggtatcttcgagccagccacgatcgacattgatctggctatcttgctgacaaaagcaagagaacatagcgttgccttggtaggtccagcggcggaggaactctttgatccggttcctgaacaggatctatttgaggcgctaaatgaaaccttaacgctatggaactcgccgcccgactgggctggcgatgagcgaaatgtagtgcttacgttgtcccgcatttggtacagcgcagtaaccggcaaaatcgcgccgaaggatgtcgctgccggctgggcaatggagcgcctgccggcccagtatcagcccgtcatacttgaagctagacaggcttatcttggacaagaagaagatcgcttggcctcgcgcgcagatcagttggaagaatttgtccactacgtgaaaggcgagatcaccaaggtagtcggcaaataaccctcgagcattcaaggcgccttgattatttgacgtggtttgatggcctccacgcacgttgtgatatgtagatgattcagttcgagtttatcattatcaatactgccatttcaaagaatacgtaaataattaatagtagtgattttcctaactttatttagtcaaaaaattagccttttaattctgctgtaacccgtacatgcccaaaatagggggcgggttacacagaatatataacatcgtaggtgtctgggtgaacagtttattcctggcatccactaaatataatggagcccgctttttaagctggcatccagaaaaaaaaagaatcccagcaccaaaatattgttttcttcaccaaccatcagttcataggtccattctcttagcgcaactacagagaacaggggcacaaacaggcaaaaaacgggcacaacctcaatggagtgatgcaacctgcctggagtaaatgatgacacaaggcaattgacccacgcatgtatctatctcattttcttacaccttctattaccttctgctctctctgatttggaaaaagctgaaaaaaaaggttgaaaccagttccctgaaattattcccctacttgactaataagtatataaagacggtaggtattgattgtaattctgtaaatctatttcttaaacttcttaaattctacttttatagttagtcttttttttagttttaaaacaccaagaacttagtttcgaataaacacacataaacaaacaaaatggaacttcagtacttctcctattttcaacccacttcatctgtcgtagccctactactagcactagtgagtattttatttagcgtagttgttttgaggaagactttcagtaacaattactccagccccgcgtcaagtacggaaaccgctgtgctgtgtcatcagaggcaacagagttgcgccctacctatcagcggccttcttcacgtgttcatgaataagaacggcctgattcatgtcaccttgggaaatatggctgacaaatatggccctatcttcagttttccgacaggcagccaccgtactttagtagtcagttcctgggaaatggtgaaagagtgtttcaccggtaataacgacacggcattctccaacagaccaatccctttggcttttcaaaccatattctacgcctgtggcggcattgattcttacggtttaagtagtgtcccgtatggtaaatactggagggagttgagaaaggtgtgtgttcacaacctgctgagtaatcagcaattgctgaagttcagacatcttataatctcccaagtggatacgtcttttaacaagttgtatgagctgtgtaagaactctgaagataatcaaggtatggtaaggatggatgattggctagctcaactttcctttaacgtcatcggtaggatcgtttgcggattccagtctgacccaaagacgggtgcaccttcaagggtagaacagtttaaggaagtcataaatgaggcgtcatattttatgtcaacaagtccagtctccgataacgtaccaatgttgggatggatcgaccaattgaccggtctgacgaggaacatgaagcattgtgggaagaagcttgacttagtagtggagtcaattatcaaggaccataggcaaaagagacgtttttcacgtacaaaaggtggcgatgagaaggatgacgaacaggacgactttattgatatttgcttgagcatcatggagcagccacagttgcccgggaacaattctccccctcaaattccgatcaaatctatcgtgctagacatgattgggggtggtaccgacactacgaaacttacaaccatatggaccctatcacttttgttgaacaatcctcacgtgttagataaagctaaacaagaggtcgacgctcactttcgtaaaaagagaagatcaacagatgacgcagcagcggcagtcgttgattttgacgacataagaaatttagtatacatccaagccatcattaaagaaagtatgaggctttatccagccagcccggtggttgagcgtctttccggcgaggattgcgttgttggaggttttcacgtgcctgctggtacgagactatgggctaacgtttggaagatgcaaagagatcccaaagtttgggacgatcctctagtattcagacctgaaaggtttttgagcgacgagcaaaagatggtagacgttcgtggccaaaactatgaacttctgccattcggcgcaggaagaagaatctgtccaggcgtttcctttagtcttgaccttatgcaacttgtcctaaccaggttaatcctagagttcgaaatgaagtccccgtccggcaaggtagatatgaccgcaactccaggactaatgtcttacaaggtggttccattggacatattgctgactcaccgtcgtatcaagtcatgcgttcaattggcgtcttctgaacgtgatatggaaagttctggggtgcctgtgatcacattgtcctcaggtaaagtaatgcccgtactgggcatgggaaccttcgaaaaggtgggtaaggggtctgaacgtgagcgtttagccattcttaaagcgatcgaagttggttaccgttactttgataccgcagcggcatatgaaacggaagaagttctaggggaagccattgctgaagctttacaattgggtctgatagagagccgtgacgagctgttcatcagctcaatgctttggtgcaccgacgcacatccagaccgtgtgctacttgctctgcaaaacagtctgagaaatctaaaacttgaatatctagacctatatatgttgccgtttcctgccagccttaagccgggcaaaattacgatggatattcctgaggaggatatttgccgtatggattatcgttcagtctggagcgccatggaagagtgtcaaaacttaggatttactaaaagtattggtgtaagcaacttttcttgcaagaaattacaagaattaatggccactgcaaatatcccgcccgcggtaaatcaagtagagatgtcaccagctttccaacagaaaaaactgagggaatattgtaacgcaaacaacatattggtatccgcagtaagcattctgggatcaaacgggacgccctggggtagtaatgctgttcttggaagcgaagttttgaaacagatcgcgatggcgaaaggcaaaagcgttgcgcaagtcagtatgaggtgggtctatgagcagggcgcgtctttagtagtcaagagtttctctgaagaacgtttaagagaaaacctgaatatttttgactgggagcttacgaaagaagacaatgagaagataggcgaaatcccgcaatgtagaatccttactgcgtacttccttgtctccccgaacggcccgtttaaatctcaggaagagctttgggatgacaaggcataaacaggccccttttcctttgtcgatatcatgtaattagttatgtcacgcttacattcacgccctcctcccacatccgctctaaccgaaaaggaaggagttagacaacctgaagtctaggtccctatttattttttttaatagttatgttagtattaagaacgttatttatatttcaaatttttcttttttttctgtacaaacgcgtgtacgcatgtaacattatactgaaaaccttgcttgagaaggttttgggacgctcgaaggctttaatttgtaatcattatcactttacgggtcctttccggtgatccgacaggttacggggcggcgacctcgcgggttttcgctatttatgaaaattttccggtttaaggcgtttccgttcttcttcgtcataacttaatgtttttatttaaaatacctcgcgagtggcaacactgaaaatacccatggagcggcgtaaccgtcgcacaggatctaggtgaagatcctttttgataatctcatgaccaaaatcccttaacgtgagttttcgttccactgagcgtcagaccccgtagaaaagatcaaaggatcttcttgagatcctttttttctgcgcgtaatctgctgcttgcaaacaaaaaaaccaccgctaccagcggtggtttgtttgccggatcaagagctaccaactctttttccgaaggtaactggcttcagcagagcgcagataccaaatactgtccttctagtgtagccgtagttaggccaccacttcaagaactctgtagcaccgcctacatacctcgctctgctaatcctgttaccagtggctgctgccagtggcgataagtcgtgtcttaccgggttggactcaagacgatagttaccggataaggcgcagcggtcgggctgaacggggggttcgtgcacacagcccagcttggagcgaacgacctacaccgaactgagatacctacagcgtgagctatgagaaagcgccacgcttcccgaagggagaaaggcggacaggtatccggtaagcggcagggtcggaacaggagagcgcacgagggagcttccagggggaaacgcctggtatctttatagtcctgtcgggtttcgccacctctgacttgagcgtcgatttttgtgatgctcgtcaggggggcggagcctatggaaaaacgccagcaacgcggcagtggaacgtgcattatgaattagttacgctagggataacagggtaatatagaacccgaacgaccgagcgcagcggcggccgcgctgataccgccgc

SEQ ID NO: 25 - DNA, 7621 bp, Artificial Sequence
  Description of Artificial Sequence: Synthetic polynucleotide
cctcgccgcagttaattaaagtcagtgagcgaggaagcgcgtaactataacggtcctaaggtagcgaatcctgatgcggtattttctccttacgcatctgtgcggtatttcacaccgcatagatcggcaagtgcacaaacaatacttaaataaatactactcagtaataacctatttcttagcatttttgacgaaatttgctattttgttagagtcttttacaccatttgtctccacacctccgcttacatcaacaccaataacgccatttaatctaagcgcatcaccaacattttctggcgtcagtccaccagctaacataaaatgtaagctttcggggctctcttgccttccaacccagtcagaaatcgagttccaatccaaaagttcacctgtcccacctgcttctgaatcaaacaagggaataaacgaatgaggtttctgtgaagctgcactgagtagtatgttgcagtcttttggaaatacgagtcttttaataactggcaaaccgaggaactcttggtattcttgccacgactcatctccatgcagttggacgatatcaatgccgtaatcattgaccagagccaaaacatcctccttaagttgattacgaaacacgccaaccaagtatttcggagtgcctgaactatttttatatgcttttacaagacttgaaattttccttgcaataaccgggtcaattgttctctttctattgggcacacatataatacccagcaagtcagcatcggaatctagagcacattctgcggcctctgtgctctgcaagccgcaaactttcaccaatggaccagaactacctgtgaaattaataacagacatactccaagctgcctttgtgtgcttaatcacgtatactcacgtgctcaatagtcaccaatgccctccctcttggccctctccttttcttttttcgaccgaattaattcttaatcggcaaaaaaagaaaagctccggatcaagattgtacgtaaggtgacaagctatttttcaataaagaatatcttccactactgccatctggcgtcataactgcaaagtacacatatattacgatgctgttctattaaatgcttcctatattatatatatagtaatgtcgtgatctatggtgcactctcagtacaatctgctctgatgccgcatagttaagccagccccgacacccgccaacacccgctgacgcgccctgacgggcttgtctgctcccggcatccgcttacagacaagctgtgaccgtctccgggagctgcatgtgtcagaggttttcaccgtcatcaccgaaacgcgcgagacgaaagggcctcgtgatacgcctatttttataggttaatgtcatgataataatggtttcttagacggatcgcttgcctgtaacttacacgcgcctcgtatcttttaatgatggaataatttgggaatttactctgtgtttatttatttttatgttttgtatttggattttagaaagtaaataaagaaggtagaagagttacggaatgaagaaaaaaaaataaacaaaggtttaaaaaatttcaacaaaaagcgtactttacatatatatttattagacaagaaaagcagattaaatagatatacattcgattaacgataagtaaaatgtaaaatcacaggattttcgtgtgtggtcttctacacagacaaggtgaaacaattcggcattaatacctgagagcaggaagagcaagataaaaggtagtatttgttggcgatccccctagagtcttttacatcttcggaaaacaaaaactattttttctttaatttctttttttactttctatttttaatttatatatttatattaaaaaatttaaattataattatttttatagcacgtgatgaaaaggacccaggtggcacttttcggggaaatgtgcgcggaacccctatttgtttatttttctaaatacattcaaatatgtatccgctcatgagacaataaccctgataaatgcttcaataatattgaaaaaggaagagtatgagtattcaacatttccgtgtcgcccttattcccttttttgcggcattttgccttcctgtttttgctcacccagaaacgctggtgaaagtaaaagatgctgaagatcagttgggacgcgtagtctagaccagccaggacagaaatgcctcgacttcgctgctacccaaggttgccgggtgacgcacaccgtggaaacggatgaaggcacgaacccagtggacataagcctgttcggttcgtaagctgtaatgcaagtagcgtatgcgctcacgcaactggtccagaaccttgaccgaacgcagcggtggtaacggcgcagtggcggttttcatggcttgttatgactgtttttttggggtacagtctatgcctcgggcatccaagcagcaagcgcgttacgccgtgggtcgatgtttgatgttatggagcagcaacgatgttacgcagcagggcagtcgccctaaaacaaagttaaacattatgagggaagcggtgatcgccgaagtatcgactcaactatcagaggtagttggcgccatcgagcgccatctcgaaccgacgttgctggccgtacatttgtacggctccgcagtggatggcggcctgaagccacacagtgatattgatttgctggttacggtgaccgtaaggcttgatgaaacaacgcggcgagctttgatcaacgaccttttggaaacttcggcttcccctggagagagcgagattctccgcgctgtagaagtcaccattgttgtgcacgacgacatcattccgtggcgttatccagctaagcgcgaactgcaatttggagaatggcagcgcaatgacattcttgcaggtatcttcgagccagccacgatcgacattgatctggctatcttgctgacaaaagcaagagaacatagcgttgccttggtaggtccagcggcggaggaactctttgatccggttcctgaacaggatctatttgaggcgctaaatgaaaccttaacgctatggaactcgccgcccgactgggctggcgatgagcgaaatgtagtgcttacgttgtcccgcatttggtacagcgcagtaaccggcaaaatcgcgccgaaggatgtcgctgccggctgggcaatggagcgcctgccggcccagtatcagcccgtcatacttgaagctagacaggcttatcttggacaagaagaagatcgcttggcctcgcgcgcagatcagttggaagaatttgtccactacgtgaaaggcgagatcaccaaggtagtcggcaaataaccctcgagcattcaaggcgccttgattatttgacgtggtttgatggcctccacgcacgttgtgatatgtagatgagagcgttggttggtggatcaagcccacgcgtaggcaatcctcgagcagatccgccaggcgtgtatatatagcgtggatggccaggcaactttagtgctgacacatacaggcatatatatatgtgtgcgacgacacatgatcatatggcatgcatgtgctctgtatgtatataaaactcttgttttcttcttttctctaaatattctttccttatacattaggacctttgcagcataaattactatacttctatagacacacaaacacaaatacacacactaaattaataatggaacttcagtacttctcctattttcaacccacttcatctgtcgtagccctactactagcactagtgagtattttatttagcgtagttgttttgaggaagactttcagtaacaattactccagccccgcgtcaagtacggaaaccgctgtgctgtgtcatcagaggcaacagagttgcgccctacctatcagcggccttcttcacgtgttcatgaataagaacggcctgattcatgtcaccttgggaaatatggctgacaaatatggccctatcttcagttttccgacaggcagccaccgtactttagtagtcagttcctgggaaatggtgaaagagtgtttcaccggtaataacgacacggcattctccaacagaccaatccctttggcttttcaaaccatattctacgcctgtggcggcattgattcttacggtttaagtagtgtcccgtatggtaaatactggagggagttgagaaaggtgtgtgttcacaacctgctgagtaatcagcaattgctgaagttcagacatcttataatctcccaagtggatacgtcttttaacaagttgtatgagctgtgtaagaactctgaagataatcaaggtatggtaaggatggatgattggctagctcaactttcctttaacgtcatcggtaggatcgtttgcggattccagtctgacccaaagacgggtgcaccttcaagggtagaacagtttaaggaagtcataaatgaggcgtcatattttatgtcaacaagtccagtctccgataacgtaccaatgttgggatggatcgaccaattgaccggtctgacgaggaacatgaagcattgtgggaagaagcttgacttagtagtggagtcaattatcaaggaccataggcaaaagagacgtttttcacgtacaaaaggtggcgatgagaaggatgacgaacaggacgactttattgatatttgcttgagcatcatggagcagccacagttgcccgggaacaattctccccctcaaattccgatcaaatctatcgtgctagacatgattgggggtggtaccgacactacgaaacttacaaccatatggaccctatcacttttgttgaacaatcctcacgtgttagataaagctaaacaagaggtcgacgctcactttcgtaaaaagagaagatcaacagatgacgcagcagcggcagtcgttgattttgacgacataagaaatttagtatacatccaagccatcattaaagaaagtatgaggctttatccagccagcccggtggttgagcgtctttccggcgaggattgcgttgttggaggttttcacgtgcctgctggtacgagactatgggctaacgtttggaagatgcaaagagatcccaaagtttgggacgatcctctagtattcagacctgaaaggtttttgagcgacgagcaaaagatggtagacgttcgtggccaaaactatgaacttctgccattcggcgcaggaagaagaatctgtccaggcgtttcctttagtcttgaccttatgcaacttgtcctaaccaggttaatcctagagttcgaaatgaagtccccgtccggcaaggtagatatgaccgcaactccaggactaatgtcttacaaggtggttccattggacatattgctgactcaccgtcgtatcaagtcatgcgttcaattggcgtcttctgaacgtgatatggaaagttctggggtgcctgtgatcacattgtcctcaggtaaagtaatgcccgtactgggcatgggaaccttcgaaaaggtgggtaaggggtctgaacgtgagcgtttagccattcttaaagcgatcgaagttggttaccgttactttgataccgcagcggcatatgaaacggaagaagttctaggggaagccattgctgaagctttacaattgggtctgatagagagccgtgacgagctgttcatcagctcaatgctttggtgcaccgacgcacatccagaccgtgtgctacttgctctgcaaaacagtctgagaaatctaaaacttgaatatctagacctatatatgttgccgtttcctgccagccttaagccgggcaaaattacgatggatattcctgaggaggatatttgccgtatggattatcgttcagtctggagcgccatggaagagtgtcaaaacttaggatttactaaaagtattggtgtaagcaacttttcttgcaagaaattacaagaattaatggccactgcaaatatcccgcccgcggtaaatcaagtagagatgtcaccagctttccaacagaaaaaactgagggaatattgtaacgcaaacaacatattggtatccgcagtaagcattctgggatcaaacgggacgccctggggtagtaatgctgttcttggaagcgaagttttgaaacagatcgcgatggcgaaaggcaaaagcgttgcgcaagtcagtatgaggtgggtctatgagcagggcgcgtctttagtagtcaagagtttctctgaagaacgtttaagagaaaacctgaatatttttgactgggagcttacgaaagaagacaatgagaagataggcgaaatcccgcaatgtagaatccttactgcgtacttccttgtctccccgaacggcccgtttaaatctcaggaagagctttgggatgacaaggcataaacaggccccttttcctttgtcgatatcatgtaattagttatgtcacgcttacattcacgccctcctcccacatccgctctaaccgaaaaggaaggagttagacaacctgaagtctaggtccctatttattttttttaatagttatgttagtattaagaacgttatttatatttcaaatttttcttttttttctgtacaaacgcgtgtacgcatgtaacattatactgaaaaccttgcttgagaaggttttgggacgctcgaaggctttaatttgtaatcattatcactttacgggtcctttccggtgatccgacaggttacggggcggcgacctcgcgggttttcgctatttatgaaaattttccggtttaaggcgtttccgttcttcttcgtcataacttaatgtttttatttaaaatacctcgcgagtggcaacactgaaaatacccatggagcggcgtaaccgtcgcacaggatctaggtgaagatcctttttgataatctcatgaccaaaatcccttaacgtgagttttcgttccactgagcgtcagaccccgtagaaaagatcaaaggatcttcttgagatcctttttttctgcgcgtaatctgctgcttgcaaacaaaaaaaccaccgctaccagcggtggtttgtttgccggatcaagagctaccaactctttttccgaaggtaactggcttcagcagagcgcagataccaaatactgtccttctagtgtagccgtagttaggccaccacttcaagaactctgtagcaccgcctacatacctcgctctgctaatcctgttaccagtggctgctgccagtggcgataagtcgtgtcttaccgggttggactcaagacgatagttaccggataaggcgcagcggtcgggctgaacggggggttcgtgcacacagcccagcttggagcgaacgacctacaccgaactgagatacctacagcgtgagctatgagaaagcgccacgcttcccgaagggagaaaggcggacaggtatccggtaagcggcagggtcggaacaggagagcgcacgagggagcttccagggggaaacgcctggtatctttatagtcctgtcgggtttcgccacctctgacttgagcgtcgatttttgtgatgctcgtcaggggggcggagcctatggaaaaacgccagcaacgcggcagtggaacgtgcattatgaattagttacgctagggataacagggtaatatagaacccgaacgaccgagcgcagcggcggccgcgctgataccgccgc

SEQ ID NO: 26 - DNA, 8187 bp, Artificial Sequence
  Description of Artificial Sequence: Synthetic polynucleotide
cctcgccgcagttaattaaagtcagtgagcgaggaagcgcgtaactataacggtcctaaggtagcgaatcctgatgcggtattttctccttacgcatctgtgcggtatttcacaccgcatagatcggcaagtgcacaaacaatacttaaataaatactactcagtaataacctatttcttagcatttttgacgaaatttgctattttgttagagtcttttacaccatttgtctccacacctccgcttacatcaacaccaataacgccatttaatctaagcgcatcaccaacattttctggcgtcagtccaccagctaacataaaatgtaagctttcggggctctcttgccttccaacccagtcagaaatcgagttccaatccaaaagttcacctgtcccacctgcttctgaatcaaacaagggaataaacgaatgaggtttctgtgaagctgcactgagtagtatgttgcagtcttttggaaatacgagtcttttaataactggcaaaccgaggaactcttggtattcttgccacgactcatctccatgcagttggacgatatcaatgccgtaatcattgaccagagccaaaacatcctccttaagttgattacgaaacacgccaaccaagtatttcggagtgcctgaactatttttatatgcttttacaagacttgaaattttccttgcaataaccgggtcaattgttctctttctattgggcacacatataatacccagcaagtcagcatcggaatctagagcacattctgcggcctctgtgctctgcaagccgcaaactttcaccaatggaccagaactacctgtgaaattaataacagacatactccaagctgcctttgtgtgcttaatcacgtatactcacgtgctcaatagtcaccaatgccctccctcttggccctctccttttcttttttcgaccgaattaattcttaatcggcaaaaaaagaaaagctccggatcaagattgtacgtaaggtgacaagctatttttcaataaagaatatcttccactactgccatctggcgtcataactgcaaagtacacatatattacgatgctgttctattaaatgcttcctatattatatatatagtaatgtcgtgatctatggtgcactctcagtacaatctgctctgatgccgcatagttaagccagccccgacacccgccaacacccgctgacgcgccctgacgggcttgtctgctcccggcatccgcttacagacaagctgtgaccgtctccgggagctgcatgtgtcagaggttttcaccgtcatcaccgaaacgcgcgagacgaaagggcctcgtgatacgcctatttttataggttaatgtcatgataataatggtttcttagacggatcgcttgcctgtaacttacacgcgcctcgtatcttttaatgatggaataatttgggaatttactctgtgtttatttatttttatgttttgtatttggattttagaaagtaaataaagaaggtagaagagttacggaatgaagaaaaaaaaataaacaaaggtttaaaaaatttcaacaaaaagcgtactttacatatatatttattagacaagaaaagcagattaaatagatatacattcgattaacgataagtaaaatgtaaaatcacaggattttcgtgtgtggtcttctacacagacaaggtgaaacaattcggcattaatacctgagagcaggaagagcaagataaaaggtagtatttgttggcgatccccctagagtcttttacatcttcggaaaacaaaaactattttttctttaatttctttttttactttctatttttaatttatatatttatattaaaaaatttaaattataattatttttatagcacgtgatgaaaaggacccaggtggcacttttcggggaaatgtgcgcggaacccctatttgtttatttttctaaatacattcaaatatgtatccgctcatgagacaataaccctgataaatgcttcaataatattgaaaaaggaagagtatgagtattcaacatttccgtgtcgcccttattcccttttttgcggcattttgccttcctgtttttgctcacccagaaacgctggtgaaagtaaaagatgctgaagatcagttgggacgcgtagtctagaccagccaggacagaaatgcctcgacttcgctgctacccaaggttgccgggtgacgcacaccgtggaaacggatgaaggcacgaacccagtggacataagcctgttcggttcgtaagctgtaatgcaagtagcgtatgcgctcacgcaactggtccagaaccttgaccgaacgcagcggtggtaacggcgcagtggcggttttcatggcttgttatgactgtttttttggggtacagtctatgcctcgggcatccaagcagcaagcgcgttacgccgtgggtcgatgtttgatgttatggagcagcaacgatgttacgcagcagggcagtcgccctaaaacaaagttaaacattatgagggaagcggtgatcgccgaagtatcgactcaactatcagaggtagttggcgccatcgagcgccatctcgaaccgacgttgctggccgtacatttgtacggctccgcagtggatggcggcctgaagccacacagtgatattgatttgctggttacggtgaccgtaaggcttgatgaaacaacgcggcgagctttgatcaacgaccttttggaaacttcggcttcccctggagagagcgagattctccgcgctgtagaagtcaccattgttgtgcacgacgacatcattccgtggcgttatccagctaagcgcgaactgcaatttggagaatggcagcgcaatgacattcttgcaggtatcttcgagccagccacgatcgacattgatctggctatcttgctgacaaaagcaagagaacatagcgttgccttggtaggtccagcggcggaggaactctttgatccggttcctgaacaggatctatttgaggcgctaaatgaaaccttaacgctatggaactcgccgcccgactgggctggcgatgagcgaaatgtagtgcttacgttgtcccgcatttggtacagcgcagtaaccggcaaaatcgcgccgaaggatgtcgctgccggctgggcaatggagcgcctgccggcccagtatcagcccgtcatacttgaagctagacaggcttatcttggacaagaagaagatcgcttggcctcgcgcgcagatcagttggaagaatttgtccactacgtgaaaggcgagatcaccaaggtagtcggcaaataaccctcgagcattcaaggcgccttgattatttgacgtggtttgatggcctccacgcacgttgtgatatgtagatgagagcgttggttggtggatcaagcccacgcgtaggcaatcctcgagcagatccgccaggcgtgtatatatagcgtggatggccaggcaactttagtgctgacacatacaggcatatatatatgtgtgcgacgacacatgatcatatggcatgcatgtgctctgtatgtatataaaactcttgttttcttcttttctctaaatattctttccttatacattaggacctttgcagcataaattactatacttctatagacacacaaacacaaatacacacactaaattaataatggaacttcagtacttctcctattttcaacccacttcatctgtcgtagccctactactagcactagtgagtattttatttagcgtagttgttttgaggaagactttcagtaacaattactccagccccgcgtcaagtacggaaaccgctgtgctgtgtcatcagaggcaacagagttgcgccctacctatcagcggccttcttcacgtgttcatgaataagaacggcctgattcatgtcaccttgggaaatatggctgacaaatatggccctatcttcagttttccgacaggcagccaccgtactttagtagtcagttcctgggaaatggtgaaagagtgtttcaccggtaataacgacacggcattctccaacagaccaatccctttggcttttcaaaccatattctacgcctgtggcggcattgattcttacggtttaagtagtgtcccgtatggtaaatactggagggagttgagaaaggtgtgtgttcacaacctgctgagtaatcagcaattgctgaagttcagacatcttataatctcccaagtggatacgtcttttaacaagttgtatgagctgtgtaagaactctgaagataatcaaggtatggtaaggatggatgattggctagctcaactttcctttaacgtcatcggtaggatcgtttgcggattccagtctgacccaaagacgggtgcaccttcaagggtagaacagtttaaggaagtcataaatgaggcgtcatattttatgtcaacaagtccagtctccgataacgtaccaatgttgggatggatcgaccaattgaccggtctgacgaggaacatgaagcattgtgggaagaagcttgacttagtagtggagtcaattatcaaggaccataggcaaaagagacgtttttcacgtacaaaaggtggcgatgagaaggatgacgaacaggacgactttattgatatttgcttgagcatcatggagcagccacagttgcccgggaacaattctccccctcaaattccgatcaaatctatcgtgctagacatgattgggggtggtaccgacactacgaaacttacaaccatatggaccctatcacttttgttgaacaatcctcacgtgttagataaagctaaacaagaggtcgacgctcactttcgtaaaaagagaagatcaacagatgacgcagcagcggcagtcgttgattttgacgacataagaaatttagtatacatccaagccatcattaaagaaagtatgaggctttatccagccagcccggtggttgagcgtctttccggcgaggattgcgttgttggaggttttcacgtgcctgctggtacgagactatgggctaacgtttggaagatgcaaagagatcccaaagtttgggacgatcctctagtattcagacctgaaaggtttttgagcgacgagcaaaagatggtagacgttcgtggccaaaactatgaacttctgccattcggcgcaggaagaagaatctgtccaggcgtttcctttagtcttgaccttatgcaacttgtcctaaccaggttaatcctagagttcgaaatgaagtccccgtccggcaaggtagatatgaccgcaactccaggactaatgtcttacaaggtggttccattggacatattgctgactcaccgtcgtatcaagtcatgcgttcaattggcgtcttctgaacgtgattaagcgaatttcttatgatttatgatttttattattaaataagttataaaaaaaataagtgtatacaaattttaaagtgactcttaggttttaaaacgaaaattcttattcttgagtaactctttcctgtaggtcaggttgctttctcaggtacatagcttcaaaatgtttctactccttttttactcttccagattttctcggactccgcgcatcgccgtaccacttcaaaacacccaagcacagcatactaaatttcccctctttcttcctctagggtgtcgttaattacccgtactaaaggtttggaaaagaaaaaagagaccgcctcgtttctttttcttcgtcgaaaaaggcaataaaaatttttatcacgtttctttttcttgaaaatttttttttttgatttttttctctttcgatgacctcccattgatatttaagttaataaacggtcttcaatttctcaagtttcagtttcatttttcttgttctattacaactttttttacttcttgctcattagaaagaaagcatagcaatctaatctaagttttaattacaaaatggaaagttctggggtgcctgtgatcacattgtcctcaggtaaagtaatgcccgtactgggcatgggaaccttcgaaaaggtgggtaaggggtctgaacgtgagcgtttagccattcttaaagcgatcgaagttggttaccgttactttgataccgcagcggcatatgaaacggaagaagttctaggggaagccattgctgaagctttacaattgggtctgatagagagccgtgacgagctgttcatcagctcaatgctttggtgcaccgacgcacatccagaccgtgtgctacttgctctgcaaaacagtctgagaaatctaaaacttgaatatctagacctatatatgttgccgtttcctgccagccttaagccgggcaaaattacgatggatattcctgaggaggatatttgccgtatggattatcgttcagtctggagcgccatggaagagtgtcaaaacttaggatttactaaaagtattggtgtaagcaacttttcttgcaagaaattacaagaattaatggccactgcaaatatcccgcccgcggtaaatcaagtagagatgtcaccagctttccaacagaaaaaactgagggaatattgtaacgcaaacaacatattggtatccgcagtaagcattctgggatcaaacgggacgccctggggtagtaatgctgttcttggaagcgaagttttgaaacagatcgcgatggcgaaaggcaaaagcgttgcgcaagtcagtatgaggtgggtctatgagcagggcgcgtctttagtagtcaagagtttctctgaagaacgtttaagagaaaacctgaatatttttgactgggagcttacgaaagaagacaatgagaagataggcgaaatcccgcaatgtagaatccttactgcgtacttccttgtctccccgaacggcccgtttaaatctcaggaagagctttgggatgacaaggcataaacaggccccttttcctttgtcgatatcatgtaattagttatgtcacgcttacattcacgccctcctcccacatccgctctaaccgaaaaggaaggagttagacaacctgaagtctaggtccctatttattttttttaatagttatgttagtattaagaacgttatttatatttcaaatttttcttttttttctgtacaaacgcgtgtacgcatgtaacattatactgaaaaccttgcttgagaaggttttgggacgctcgaaggctttaatttgtaatcattatcactttacgggtcctttccggtgatccgacaggttacggggcggcgacctcgcgggttttcgctatttatgaaaattttccggtttaaggcgtttccgttcttcttcgtcataacttaatgtttttatttaaaatacctcgcgagtggcaacactgaaaatacccatggagcggcgtaaccgtcgcacaggatctaggtgaagatcctttttgataatctcatgaccaaaatcccttaacgtgagttttcgttccactgagcgtcagaccccgtagaaaagatcaaaggatcttcttgagatcctttttttctgcgcgtaatctgctgcttgcaaacaaaaaaaccaccgctaccagcggtggtttgtttgccggatcaagagctaccaactctttttccgaaggtaactggcttcagcagagcgcagataccaaatactgtccttctagtgtagccgtagttaggccaccacttcaagaactctgtagcaccgcctacatacctcgctctgctaatcctgttaccagtggctgctgccagtggcgataagtcgtgtcttaccgggttggactcaagacgatagttaccggataaggcgcagcggtcgggctgaacggggggttcgtgcacacagcccagcttggagcgaacgacctacaccgaactgagatacctacagcgtgagctatgagaaagcgccacgcttcccgaagggagaaaggcggacaggtatccggtaagcggcagggtcggaacaggagagcgcacgagggagcttccagggggaaacgcctggtatctttatagtcctgtcgggtttcgccacctctgacttgagcgtcgatttttgtgatgctcgtcaggggggcggagcctatggaaaaacgccagcaacgcggcagtggaacgtgcattatgaattagttacgctagggataacagggtaatatagaacccgaacgaccgagcgcagcggcggccgcgctgataccgccgc

SEQ ID NO: 27 - DNA, 8580 bp, Artificial Sequence
  Description of Artificial Sequence: Synthetic polynucleotide
cctcgccgcagttaattaaagtcagtgagcgaggaagcgcgtaactataacggtcctaaggtagcgaatcctgatgcggtattttctccttacgcatctgtgcggtatttcacaccgcatagatcggcaagtgcacaaacaatacttaaataaatactactcagtaataacctatttcttagcatttttgacgaaatttgctattttgttagagtcttttacaccatttgtctccacacctccgcttacatcaacaccaataacgccatttaatctaagcgcatcaccaacattttctggcgtcagtccaccagctaacataaaatgtaagctttcggggctctcttgccttccaacccagtcagaaatcgagttccaatccaaaagttcacctgtcccacctgcttctgaatcaaacaagggaataaacgaatgaggtttctgtgaagctgcactgagtagtatgttgcagtcttttggaaatacgagtcttttaataactggcaaaccgaggaactcttggtattcttgccacgactcatctccatgcagttggacgatatcaatgccgtaatcattgaccagagccaaaacatcctccttaagttgattacgaaacacgccaaccaagtatttcggagtgcctgaactatttttatatgcttttacaagacttgaaattttccttgcaataaccgggtcaattgttctctttctattgggcacacatataatacccagcaagtcagcatcggaatctagagcacattctgcggcctctgtgctctgcaagccgcaaactttcaccaatggaccagaactacctgtgaaattaataacagacatactccaagctgcctttgtgtgcttaatcacgtatactcacgtgctcaatagtcaccaatgccctccctcttggccctctccttttcttttttcgaccgaattaattcttaatcggcaaaaaaagaaaagctccggatcaagattgtacgtaaggtgacaagctatttttcaataaagaatatcttccactactgccatctggcgtcataactgcaaagtacacatatattacgatgctgttctattaaatgcttcctatattatatatatagtaatgtcgtgatctatggtgcactctcagtacaatctgctctgatgccgcatagttaagccagccccgacacccgccaacacccgctgacgcgccctgacgggcttgtctgctcccggcatccgcttacagacaagctgtgaccgtctccgggagctgcatgtgtcagaggttttcaccgtcatcaccgaaacgcgcgagacgaaagggcctcgtgatacgcctatttttataggttaatgtcatgataataatggtttcttagacggatcgcttgcctgtaacttacacgcgcctcgtatcttttaatgatggaataatttgggaatttactctgtgtttatttatttttatgttttgtatttggattttagaaagtaaataaagaaggtagaagagttacggaatgaagaaaaaaaaataaacaaaggtttaaaaaatttcaacaaaaagcgtactttacatatatatttattagacaagaaaagcagattaaatagatatacattcgattaacgataagtaaaatgtaaaatcacaggattttcgtgtgtggtcttctacacagacaaggtgaaacaattcggcattaatacctgagagcaggaagagcaagataaaaggtagtatttgttggcgatccccctagagtcttttacatcttcggaaaacaaaaactattttttctttaatttctttttttactttctatttttaatttatatatttatattaaaaaatttaaattataattatttttatagcacgtgatgaaaaggacccaggtggcacttttcggggaaatgtgcgcggaacccctatttgtttatttttctaaatacattcaaatatgtatccgctcatgagacaataaccctgataaatgcttcaataatattgaaaaaggaagagtatgagtattcaacatttccgtgtcgcccttattcccttttttgcggcattttgccttcctgtttttgctcacccagaaacgctggtgaaagtaaaagatgctgaagatcagttgggacgcgtagtctagaccagccaggacagaaatgcctcgacttcgctgctacccaaggttgccgggtgacgcacaccgtggaaacggatgaaggcacgaacccagtggacataagcctgttcggttcgtaagctgtaatgcaagtagcgtatgcgctcacgcaactggtccagaaccttgaccgaacgcagcggtggtaacggcgcagtggcggttttcatggcttgttatgactgtttttttggggtacagtctatgcctcgggcatccaagcagcaagcgcgttacgccgtgggtcgatgtttgatgttatggagcagcaacgatgttacgcagcagggcagtcgccctaaaacaaagttaaacattatgagggaagcggtgatcgccgaagtatcgactcaactatcagaggtagttggcgccatcgagcgccatctcgaaccgacgttgctggccgtacatttgtacggctccgcagtggatggcggcctgaagccacacagtgatattgatttgctggttacggtgaccgtaaggcttgatgaaacaacgcggcgagctttgatcaacgaccttttggaaacttcggcttcccctggagagagcgagattctccgcgctgtagaagtcaccattgttgtgcacgacgacatcattccgtggcgttatccagctaagcgcgaactgcaatttggagaatggcagcgcaatgacattcttgcaggtatcttcgagccagccacgatcgacattgatctggctatcttgctgacaaaagcaagagaacatagcgttgccttggtaggtccagcggcggaggaactctttgatccggttcctgaacaggatctatttgaggcgctaaatgaaaccttaacgctatggaactcgccgcccgactgggctggcgatgagcgaaatgtagtgcttacgttgtcccgcatttggtacagcgcagtaaccggcaaaatcgcgccgaaggatgtcgctgccggctgggcaatggagcgcctgccggcccagtatcagcccgtcatacttgaagctagacaggcttatcttggacaagaagaagatcgcttggcctcgcgcgcagatcagttggaagaatttgtccactacgtgaaaggcgagatcaccaaggtagtcggcaaataaccctcgagcattcaaggcgccttgattatttgacgtggtttgatggcctccacgcacgttgtgatatgtagatgattcagttcgagtttatcattatcaatactgccatttcaaagaatacgtaaataattaatagtagtgattttcctaactttatttagtcaaaaaattagccttttaattctgctgtaacccgtacatgcccaaaatagggggcgggttacacagaatatataacatcgtaggtgtctgggtgaacagtttattcctggcatccactaaatataatggagcccgctttttaagctggcatccagaaaaaaaaagaatcccagcaccaaaatattgttttcttcaccaaccatcagttcataggtccattctcttagcgcaactacagagaacaggggcacaaacaggcaaaaaacgggcacaacctcaatggagtgatgcaacctgcctggagtaaatgatgacacaaggcaattgacccacgcatgtatctatctcattttcttacaccttctattaccttctgctctctctgatttggaaaaagctgaaaaaaaaggttgaaaccagttccctgaaattattcccctacttgactaataagtatataaagacggtaggtattgattgtaattctgtaaatctatttcttaaacttcttaaattctacttttatagttagtcttttttttagttttaaaacaccaagaacttagtttcgaataaacacacataaacaaacaaaatggaacttcagtacttctcctattttcaacccacttcatctgtcgtagccctactactagcactagtgagtattttatttagcgtagttgttttgaggaagactttcagtaacaattactccagccccgcgtcaagtacggaaaccgctgtgctgtgtcatcagaggcaacagagttgcgccctacctatcagcggccttcttcacgtgttcatgaataagaacggcctgattcatgtcaccttgggaaatatggctgacaaatatggccctatcttcagttttccgacaggcagccaccgtactttagtagtcagttcctgggaaatggtgaaagagtgtttcaccggtaataacgacacggcattctccaacagaccaatccctttggcttttcaaaccatattctacgcctgtggcggcattgattcttacggtttaagtagtgtcccgtatggtaaatactggagggagttgagaaaggtgtgtgttcacaacctgctgagtaatcagcaattgctgaagttcagacatcttataatctcccaagtggatacgtcttttaacaagttgtatgagctgtgtaagaactctgaagataatcaaggtatggtaaggatggatgattggctagctcaactttcctttaacgtcatcggtaggatcgtttgcggattccagtctgacccaaagacgggtgcaccttcaagggtagaacagtttaaggaagtcataaatgaggcgtcatattttatgtcaacaagtccagtctccgataacgtaccaatgttgggatggatcgaccaattgaccggtctgacgaggaacatgaagcattgtgggaagaagcttgacttagtagtggagtcaattatcaaggaccataggcaaaagagacgtttttcacgtacaaaaggtggcgatgagaaggatgacgaacaggacgactttattgatatttgcttgagcatcatggagcagccacagttgcccgggaacaattctccccctcaaattccgatcaaatctatcgtgctagacatgattgggggtggtaccgacactacgaaacttacaaccatatggaccctatcacttttgttgaacaatcctcacgtgttagataaagctaaacaagaggtcgacgctcactttcgtaaaaagagaagatcaacagatgacgcagcagcggcagtcgttgattttgacgacataagaaatttagtatacatccaagccatcattaaagaaagtatgaggctttatccagccagcccggtggttgagcgtctttccggcgaggattgcgttgttggaggttttcacgtgcctgctggtacgagactatgggctaacgtttggaagatgcaaagagatcccaaagtttgggacgatcctctagtattcagacctgaaaggtttttgagcgacgagcaaaagatggtagacgttcgtggccaaaactatgaacttctgccattcggcgcaggaagaagaatctgtccaggcgtttcctttagtcttgaccttatgcaacttgtcctaaccaggttaatcctagagttcgaaatgaagtccccgtccggcaaggtagatatgaccgcaactccaggactaatgtcttacaaggtggttccattggacatattgctgactcaccgtcgtatcaagtcatgcgttcaattggcgtcttctgaacgtgattaagcgaatttcttatgatttatgatttttattattaaataagttataaaaaaaataagtgtatacaaattttaaagtgactcttaggttttaaaacgaaaattcttattcttgagtaactctttcctgtaggtcaggttgctttctcaggtacatagcttcaaaatgtttctactccttttttactcttccagattttctcggactccgcgcatcgccgtaccacttcaaaacacccaagcacagcatactaaatttcccctctttcttcctctagggtgtcgttaattacccgtactaaaggtttggaaaagaaaaaagagaccgcctcgtttctttttcttcgtcgaaaaaggcaataaaaatttttatcacgtttctttttcttgaaaatttttttttttgatttttttctctttcgatgacctcccattgatatttaagttaataaacggtcttcaatttctcaagtttcagtttcatttttcttgttctattacaactttttttacttcttgctcattagaaagaaagcatagcaatctaatctaagttttaattacaaaatggaaagttctggggtgcctgtgatcacattgtcctcaggtaaagtaatgcccgtactgggcatgggaaccttcgaaaaggtgggtaaggggtctgaacgtgagcgtttagccattcttaaagcgatcgaagttggttaccgttactttgataccgcagcggcatatgaaacggaagaagttctaggggaagccattgctgaagctttacaattgggtctgatagagagccgtgacgagctgttcatcagctcaatgctttggtgcaccgacgcacatccagaccgtgtgctacttgctctgcaaaacagtctgagaaatctaaaacttgaatatctagacctatatatgttgccgtttcctgccagccttaagccgggcaaaattacgatggatattcctgaggaggatatttgccgtatggattatcgttcagtctggagcgccatggaagagtgtcaaaacttaggatttactaaaagtattggtgtaagcaacttttcttgcaagaaattacaagaattaatggccactgcaaatatcccgcccgcggtaaatcaagtagagatgtcaccagctttccaacagaaaaaactgagggaatattgtaacgcaaacaacatattggtatccgcagtaagcattctgggatcaaacgggacgccctggggtagtaatgctgttcttggaagcgaagttttgaaacagatcgcgatggcgaaaggcaaaagcgttgcgcaagtcagtatgaggtgggtctatgagcagggcgcgtctttagtagtcaagagtttctctgaagaacgtttaagagaaaacctgaatatttttgactgggagcttacgaaagaagacaatgagaagataggcgaaatcccgcaatgtagaatccttactgcgtacttccttgtctccccgaacggcccgtttaaatctcaggaagagctttgggatgacaaggcataaacaggccccttttcctttgtcgatatcatgtaattagttatgtcacgcttacattcacgccctcctcccacatccgctctaaccgaaaaggaaggagttagacaacctgaagtctaggtccctatttattttttttaatagttatgttagtattaagaacgttatttatatttcaaatttttcttttttttctgtacaaacgcgtgtacgcatgtaacattatactgaaaaccttgcttgagaaggttttgggacgctcgaaggctttaatttgtaatcattatcactttacgggtcctttccggtgatccgacaggttacggggcggcgacctcgcgggttttcgctatttatgaaaattttccggtttaaggcgtttccgttcttcttcgtcataacttaatgtttttatttaaaatacctcgcgagtggcaacactgaaaatacccatggagcggcgtaaccgtcgcacaggatctaggtgaagatcctttttgataatctcatgaccaaaatcccttaacgtgagttttcgttccactgagcgtcagaccccgtagaaaagatcaaaggatcttcttgagatcctttttttctgcgcgtaatctgctgcttgcaaacaaaaaaaccaccgctaccagcggtggtttgtttgccggatcaagagctaccaactctttttccgaaggtaactggcttcagcagagcgcagataccaaatactgtccttctagtgtagccgtagttaggccaccacttcaagaactctgtagcaccgcctacatacctcgctctgctaatcctgttaccagtggctgctgccagtggcgataagtcgtgtcttaccgggttggactcaagacgatagttaccggataaggcgcagcggtcgggctgaacggggggttcgtgcacacagcccagcttggagcgaacgacctacaccgaactgagatacctacagcgtgagctatgagaaagcgccacgcttcccgaagggagaaaggcggacaggtatccggtaagcggcagggtcggaacaggagagcgcacgagggagcttccagggggaaacgcctggtatctttatagtcctgtcgggtttcgccacctctgacttgagcgtcgatttttgtgatgctcgtcaggggggcggagcctatggaaaaacgccagcaacgcggcagtggaacgtgcattatgaattagttacgctagggataacagggtaatatagaacccgaacgaccgagcgcagcggcggccgcgctgataccgccgc

SEQ ID NO: 28 - DNA, 8456 bp, Artificial Sequence
  Description of Artificial Sequence: Synthetic polynucleotide
cctcgccgcagttaattaaagtcagtgagcgaggaagcgcgtaactataacggtcctaaggtagcgaatcctgatgcggtattttctccttacgcatctgtgcggtatttcacaccgcatagatcggcaagtgcacaaacaatacttaaataaatactactcagtaataacctatttcttagcatttttgacgaaatttgctattttgttagagtcttttacaccatttgtctccacacctccgcttacatcaacaccaataacgccatttaatctaagcgcatcaccaacattttctggcgtcagtccaccagctaacataaaatgtaagctttcggggctctcttgccttccaacccagtcagaaatcgagttccaatccaaaagttcacctgtcccacctgcttctgaatcaaacaagggaataaacgaatgaggtttctgtgaagctgcactgagtagtatgttgcagtcttttggaaatacgagtcttttaataactggcaaaccgaggaactcttggtattcttgccacgactcatctccatgcagttggacgatatcaatgccgtaatcattgaccagagccaaaacatcctccttaagttgattacgaaacacgccaaccaagtatttcggagtgcctgaactatttttatatgcttttacaagacttgaaattttccttgcaataaccgggtcaattgttctctttctattgggcacacatataatacccagcaagtcagcatcggaatctagagcacattctgcggcctctgtgctctgcaagccgcaaactttcaccaatggaccagaactacctgtgaaattaataacagacatactccaagctgcctttgtgtgcttaatcacgtatactcacgtgctcaatagtcaccaatgccctccctcttggccctctccttttcttttttcgaccgaattaattcttaatcggcaaaaaaagaaaagctccggatcaagattgtacgtaaggtgacaagctatttttcaataaagaatatcttccactactgccatctggcgtcataactgcaaagtacacatatattacgatgctgttctattaaatgcttcctatattatatatatagtaatgtcgtgatctatggtgcactctcagtacaatctgctctgatgccgcatagttaagccagccccgacacccgccaacacccgctgacgcgccctgacgggcttgtctgctcccggcatccgcttacagacaagctgtgaccgtctccgggagctgcatgtgtcagaggttttcaccgtcatcaccgaaacgcgcgagacgaaagggcctcgtgatacgcctatttttataggttaatgtcatgataataatggtttcttagacggatcgcttgcctgtaacttacacgcgcctcgtatcttttaatgatggaataatttgggaatttactctgtgtttatttatttttatgttttgtatttggattttagaaagtaaataaagaaggtagaagagttacggaatgaagaaaaaaaaataaacaaaggtttaaaaaatttcaacaaaaagcgtactttacatatatatttattagacaagaaaagcagattaaatagatatacattcgattaacgataagtaaaatgtaaaatcacaggattttcgtgtgtggtcttctacacagacaaggtgaaacaattcggcattaatacctgagagcaggaagagcaagataaaaggtagtatttgttggcgatccccctagagtcttttacatcttcggaaaacaaaaactattttttctttaatttctttttttactttctatttttaatttatatatttatattaaaaaatttaaattataattatttttatagcacgtgatgaaaaggacccaggtggcacttttcggggaaatgtgcgcggaacccctatttgtttatttttctaaatacattcaaatatgtatccgctcatgagacaataaccctgataaatgcttcaataatattgaaaaaggaagagtatgagtattcaacatttccgtgtcgcccttattcccttttttgcggcattttgccttcctgtttttgctcacccagaaacgctggtgaaagtaaaagatgctgaagatcagttgggacgcgtagtctagaccagccaggacagaaatgcctcgacttcgctgctacccaaggttgccgggtgacgcacaccgtggaaacggatgaaggcacgaacccagtggacataagcctgttcggttcgtaagctgtaatgcaagtagcgtatgcgctcacgcaactggtccagaaccttgaccgaacgcagcggtggtaacggcgcagtggcggttttcatggcttgttatgactgtttttttggggtacagtctatgcctcgggcatccaagcagcaagcgcgttacgccgtgggtcgatgtttgatgttatggagcagcaacgatgttacgcagcagggcagtcgccctaaaacaaagttaaacattatgagggaagcggtgatcgccgaagtatcgactcaactatcagaggtagttggcgccatcgagcgccatctcgaaccgacgttgctggccgtacatttgtacggctccgcagtggatggcggcctgaagccacacagtgatattgatttgctggttacggtgaccgtaaggcttgatgaaacaacgcggcgagctttgatcaacgaccttttggaaacttcggcttcccctggagagagcgagattctccgcgctgtagaagtcaccattgttgtgcacgacgacatcattccgtggcgttatccagctaagcgcgaactgcaatttggagaatggcagcgcaatgacattcttgcaggtatcttcgagccagccacgatcgacattgatctggctatcttgctgacaaaagcaagagaacatagcgttgccttggtaggtccagcggcggaggaactctttgatccggttcctgaacaggatctatttgaggcgctaaatgaaaccttaacgctatggaactcgccgcccgactgggctggcgatgagcgaaatgtagtgcttacgttgtcccgcatttggtacagcgcagtaaccggcaaaatcgcgccgaaggatgtcgctgccggctgggcaatggagcgcctgccggcccagtatcagcccgtcatacttgaagctagacaggcttatcttggacaagaagaagatcgcttggcctcgcgcgcagatcagttggaagaatttgtccactacgtgaaaggcgagatcaccaaggtagtcggcaaataaccctcgagcattcaaggcgccttgattatttgacgtggtttgatggcctccacgcacgttgtgatatgtagatgagagcgttggttggtggatcaagcccacgcgtaggcaatcctcgagcagatccgccaggcgtgtatatatagcgtggatggccaggcaactttagtgctgacacatacaggcatatatatatgtgtgcgacgacacatgatcatatggcatgcatgtgctctgtatgtatataaaactcttgttttcttcttttctctaaatattctttccttatacattaggacctttgcagcataaattactatacttctatagacacacaaacacaaatacacacactaaattaataatggaacttcagtacttctcctattttcaacccacttcatctgtcgtagccctactactagcactagtgagtattttatttagcgtagttgttttgaggaagactttcagtaacaattactccagccccgcgtcaagtacggaaaccgctgtgctgtgtcatcagaggcaacagagttgcgccctacctatcagcggccttcttcacgtgttcatgaataagaacggcctgattcatgtcaccttgggaaatatggctgacaaatatggccctatcttcagttttccgacaggcagccaccgtactttagtagtcagttcctgggaaatggtgaaagagtgtttcaccggtaataacgacacggcattctccaacagaccaatccctttggcttttcaaaccatattctacgcctgtggcggcattgattcttacggtttaagtagtgtcccgtatggtaaatactggagggagttgagaaaggtgtgtgttcacaacctgctgagtaatcagcaattgctgaagttcagacatcttataatctcccaagtggatacgtcttttaacaagttgtatgagctgtgtaagaactctgaagataatcaaggtatggtaaggatggatgattggctagctcaactttcctttaacgtcatcggtaggatcgtttgcggattccagtctgacccaaagacgggtgcaccttcaagggtagaacagtttaaggaagtcataaatgaggcgtcatattttatgtcaacaagtccagtctccgataacgtaccaatgttgggatggatcgaccaattgaccggtctgacgaggaacatgaagcattgtgggaagaagcttgacttagtagtggagtcaattatcaaggaccataggcaaaagagacgtttttcacgtacaaaaggtggcgatgagaaggatgacgaacaggacgactttattgatatttgcttgagcatcatggagcagccacagttgcccgggaacaattctccccctcaaattccgatcaaatctatcgtgctagacatgattgggggtggtaccgacactacgaaacttacaaccatatggaccctatcacttttgttgaacaatcctcacgtgttagataaagctaaacaagaggtcgacgctcactttcgtaaaaagagaagatcaacagatgacgcagcagcggcagtcgttgattttgacgacataagaaatttagtatacatccaagccatcattaaagaaagtatgaggctttatccagccagcccggtggttgagcgtctttccggcgaggattgcgttgttggaggttttcacgtgcctgctggtacgagactatgggctaacgtttggaagatgcaaagagatcccaaagtttgggacgatcctctagtattcagacctgaaaggtttttgagcgacgagcaaaagatggtagacgttcgtggccaaaactatgaacttctgccattcggcgcaggaagaagaatctgtccaggcgtttcctttagtcttgaccttatgcaacttgtcctaaccaggttaatcctagagttcgaaatgaagtccccgtccggcaaggtagatatgaccgcaactccaggactaatgtcttacaaggtggttccattggacatattgctgactcaccgtcgtatcaagtcatgcgttcaattggcgtcttctgaacgtgattaagcgaatttcttatgatttatgatttttattattaaataagttataaaaaaaataagtgtatacaaattttaaagtgactcttaggttttaaaacgaaaattcttattcttgagtaactctttcctgtaggtcaggttgctttctcaggtattcagttcgagtttatcattatcaatactgccatttcaaagaatacgtaaataattaatagtagtgattttcctaactttatttagtcaaaaaattagccttttaattctgctgtaacccgtacatgcccaaaatagggggcgggttacacagaatatataacatcgtaggtgtctgggtgaacagtttattcctggcatccactaaatataatggagcccgctttttaagctggcatccagaaaaaaaaagaatcccagcaccaaaatattgttttcttcaccaaccatcagttcataggtccattctcttagcgcaactacagagaacaggggcacaaacaggcaaaaaacgggcacaacctcaatggagtgatgcaacctgcctggagtaaatgatgacacaaggcaattgacccacgcatgtatctatctcattttcttacaccttctattaccttctgctctctctgatttggaaaaagctgaaaaaaaaggttgaaaccagttccctgaaattattcccctacttgactaataagtatataaagacggtaggtattgattgtaattctgtaaatctatttcttaaacttcttaaattctacttttatagttagtcttttttttagttttaaaacaccaagaacttagtttcgaataaacacacataaacaaacaaaatggaaagttctggggtgcctgtgatcacattgtcctcaggtaaagtaatgcccgtactgggcatgggaaccttcgaaaaggtgggtaaggggtctgaacgtgagcgtttagccattcttaaagcgatcgaagttggttaccgttactttgataccgcagcggcatatgaaacggaagaagttctaggggaagccattgctgaagctttacaattgggtctgatagagagccgtgacgagctgttcatcagctcaatgctttggtgcaccgacgcacatccagaccgtgtgctacttgctctgcaaaacagtctgagaaatctaaaacttgaatatctagacctatatatgttgccgtttcctgccagccttaagccgggcaaaattacgatggatattcctgaggaggatatttgccgtatggattatcgttcagtctggagcgccatggaagagtgtcaaaacttaggatttactaaaagtattggtgtaagcaacttttcttgcaagaaattacaagaattaatggccactgcaaatatcccgcccgcggtaaatcaagtagagatgtcaccagctttccaacagaaaaaactgagggaatattgtaacgcaaacaacatattggtatccgcagtaagcattctgggatcaaacgggacgccctggggtagtaatgctgttcttggaagcgaagttttgaaacagatcgcgatggcgaaaggcaaaagcgttgcgcaagtcagtatgaggtgggtctatgagcagggcgcgtctttagtagtcaagagtttctctgaagaacgtttaagagaaaacctgaatatttttgactgggagcttacgaaagaagacaatgagaagataggcgaaatcccgcaatgtagaatccttactgcgtacttccttgtctccccgaacggcccgtttaaatctcaggaagagctttgggatgacaaggcataaacaggccccttttcctttgtcgatatcatgtaattagttatgtcacgcttacattcacgccctcctcccacatccgctctaaccgaaaaggaaggagttagacaacctgaagtctaggtccctatttattttttttaatagttatgttagtattaagaacgttatttatatttcaaatttttcttttttttctgtacaaacgcgtgtacgcatgtaacattatactgaaaaccttgcttgagaaggttttgggacgctcgaaggctttaatttgtaatcattatcactttacgggtcctttccggtgatccgacaggttacggggcggcgacctcgcgggttttcgctatttatgaaaattttccggtttaaggcgtttccgttcttcttcgtcataacttaatgtttttatttaaaatacctcgcgagtggcaacactgaaaatacccatggagcggcgtaaccgtcgcacaggatctaggtgaagatcctttttgataatctcatgaccaaaatcccttaacgtgagttttcgttccactgagcgtcagaccccgtagaaaagatcaaaggatcttcttgagatcctttttttctgcgcgtaatctgctgcttgcaaacaaaaaaaccaccgctaccagcggtggtttgtttgccggatcaagagctaccaactctttttccgaaggtaactggcttcagcagagcgcagataccaaatactgtccttctagtgtagccgtagttaggccaccacttcaagaactctgtagcaccgcctacatacctcgctctgctaatcctgttaccagtggctgctgccagtggcgataagtcgtgtcttaccgggttggactcaagacgatagttaccggataaggcgcagcggtcgggctgaacggggggttcgtgcacacagcccagcttggagcgaacgacctacaccgaactgagatacctacagcgtgagctatgagaaagcgccacgcttcccgaagggagaaaggcggacaggtatccggtaagcggcagggtcggaacaggagagcgcacgagggagcttccagggggaaacgcctggtatctttatagtcctgtcgggtttcgccacctctgacttgagcgtcgatttttgtgatgctcgtcaggggggcggagcctatggaaaaacgccagcaacgcggcagtggaacgtgcattatgaattagttacgctagggataacagggtaatatagaacccgaacgaccgagcgcagcggcggccgcgctgataccgccgc

SEQ ID NO: 29 - DNA, 8456 bp, Artificial Sequence
  Description of Artificial Sequence: Synthetic polynucleotide
cctcgccgcagttaattaaagtcagtgagcgaggaagcgcgtaactataacggtcctaaggtagcgaatcctgatgcggtattttctccttacgcatctgtgcggtatttcacaccgcatagatcggcaagtgcacaaacaatacttaaataaatactactcagtaataacctatttcttagcatttttgacgaaatttgctattttgttagagtcttttacaccatttgtctccacacctccgcttacatcaacaccaataacgccatttaatctaagcgcatcaccaacattttctggcgtcagtccaccagctaacataaaatgtaagctttcggggctctcttgccttccaacccagtcagaaatcgagttccaatccaaaagttcacctgtcccacctgcttctgaatcaaacaagggaataaacgaatgaggtttctgtgaagctgcactgagtagtatgttgcagtcttttggaaatacgagtcttttaataactggcaaaccgaggaactcttggtattcttgccacgactcatctccatgcagttggacgatatcaatgccgtaatcattgaccagagccaaaacatcctccttaagttgattacgaaacacgccaaccaagtatttcggagtgcctgaactatttttatatgcttttacaagacttgaaattttccttgcaataaccgggtcaattgttctctttctattgggcacacatataatacccagcaagtcagcatcggaatctagagcacattctgcggcctctgtgctctgcaagccgcaaactttcaccaatggaccagaactacctgtgaaattaataacagacatactccaagctgcctttgtgtgcttaatcacgtatactcacgtgctcaatagtcaccaatgccctccctcttggccctctccttttcttttttcgaccgaattaattcttaatcggcaaaaaaagaaaagctccggatcaagattgtacgtaaggtgacaagctatttttcaataaagaatatcttccactactgccatctggcgtcataactgcaaagtacacatatattacgatgctgttctattaaatgcttcctatattatatatatagtaatgtcgtgatctatggtgcactctcagtacaatctgctctgatgccgcatagttaagccagccccgacacccgccaacacccgctgacgcgccctgacgggcttgtctgctcccggcatccgcttacagacaagctgtgaccgtctccgggagctgcatgtgtcagaggttttcaccgtcatcaccgaaacgcgcgagacgaaagggcctcgtgatacgcctatttttataggttaatgtcatgataataatggtttcttagacggatcgcttgcctgtaacttacacgcgcctcgtatcttttaatgatggaataatttgggaatttactctgtgtttatttatttttatgttttgtatttggattttagaaagtaaataaagaaggtagaagagttacggaatgaagaaaaaaaaataaacaaaggtttaaaaaatttcaacaaaaagcgtactttacatatatatttattagacaagaaaagcagattaaatagatatacattcgattaacgataagtaaaatgtaaaatcacaggattttcgtgtgtggtcttctacacagacaaggtgaaacaattcggcattaatacctgagagcaggaagagcaagataaaaggtagtatttgttggcgatccccctagagtcttttacatcttcggaaaacaaaaactattttttctttaatttctttttttactttctatttttaatttatatatttatattaaaaaatttaaattataattatttttatagcacgtgatgaaaaggacccaggtggcacttttcggggaaatgtgcgcggaacccctatttgtttatttttctaaatacattcaaatatgtatccgctcatgagacaataaccctgataaatgcttcaataatattgaaaaaggaagagtatgagtattcaacatttccgtgtcgcccttattcccttttttgcggcattttgccttcctgtttttgctcacccagaaacgctggtgaaagtaaaagatgctgaagatcagttgggacgcgtagtctagaccagccaggacagaaatgcctcgacttcgctgctacccaaggttgccgggtgacgcacaccgtggaaacggatgaaggcacgaacccagtggacataagcctgttcggttcgtaagctgtaatgcaagtagcgtatgcgctcacgcaactggtccagaaccttgaccgaacgcagcggtggtaacggcgcagtggcggttttcatggcttgttatgactgtttttttggggtacagtctatgcctcgggcatccaagcagcaagcgcgttacgccgtgggtcgatgtttgatgttatggagcagcaacgatgttacgcagcagggcagtcgccctaaaacaaagttaaacattatgagggaagcggtgatcgccgaagtatcgactcaactatcagaggtagttggcgccatcgagcgccatctcgaaccgacgttgctggccgtacatttgtacggctccgcagtggatggcggcctgaagccacacagtgatattgatttgctggttacggtgaccgtaaggcttgatgaaacaacgcggcgagctttgatcaacgaccttttggaaacttcggcttcccctggagagagcgagattctccgcgctgtagaagtcaccattgttgtgcacgacgacatcattccgtggcgttatccagctaagcgcgaactgcaatttggagaatggcagcgcaatgacattcttgcaggtatcttcgagccagccacgatcgacattgatctggctatcttgctgacaaaagcaagagaacatagcgttgccttggtaggtccagcggcggaggaactctttgatccggttcctgaacaggatctatttgaggcgctaaatgaaaccttaacgctatggaactcgccgcccgactgggctggcgatgagcgaaatgtagtgcttacgttgtcccgcatttggtacagcgcagtaaccggcaaaatcgcgccgaaggatgtcgctgccggctgggcaatggagcgcctgccggcccagtatcagcccgtcatacttgaagctagacaggcttatcttggacaagaagaagatcgcttggcctcgcgcgcagatcagttggaagaatttgtccactacgtgaaaggcgagatcaccaaggtagtcggcaaataaccctcgagcattcaaggcgccttgattatttgacgtggtttgatggcctccacgcacgttgtgatatgtagatgattcagttcgagtttatcattatcaatactgccatttcaaagaatacgtaaataattaatagtagtgattttcctaactttatttagtcaaaaaattagccttttaattctgctgtaacccgtacatgcccaaaatagggggcgggttacacagaatatataacatcgtaggtgtctgggtgaacagtttattcctggcatccactaaatataatggagcccgctttttaagctggcatccagaaaaaaaaagaatcccagcaccaaaatattgttttcttcaccaaccatcagttcataggtccattctcttagcgcaactacagagaacaggggcacaaacaggcaaaaaacgggcacaacctcaatggagtgatgcaacctgcctggagtaaatgatgacacaaggcaattgacccacgcatgtatctatctcattttcttacaccttctattaccttctgctctctctgatttggaaaaagctgaaaaaaaaggttgaaaccagttccctgaaattattcccctacttgactaataagtatataaagacggtaggtattgattgtaattctgtaaatctatttcttaaacttcttaaattctacttttatagttagtcttttttttagttttaaaacaccaagaacttagtttcgaataaacacacataaacaaacaaaatggaacttcagtacttctcctattttcaacccacttcatctgtcgtagccctactactagcactagtgagtattttatttagcgtagttgttttgaggaagactttcagtaacaattactccagccccgcgtcaagtacggaaaccgctgtgctgtgtcatcagaggcaacagagttgcgccctacctatcagcggccttcttcacgtgttcatgaataagaacggcctgattcatgtcaccttgggaaatatggctgacaaatatggccctatcttcagttttccgacaggcagccaccgtactttagtagtcagttcctgggaaatggtgaaagagtgtttcaccggtaataacgacacggcattctccaacagaccaatccctttggcttttcaaaccatattctacgcctgtggcggcattgattcttacggtttaagtagtgtcccgtatggtaaatactggagggagttgagaaaggtgtgtgttcacaacctgctgagtaatcagcaattgctgaagttcagacatcttataatctcccaagtggatacgtcttttaacaagttgtatgagctgtgtaagaactctgaagataatcaaggtatggtaaggatggatgattggctagctcaactttcctttaacgtcatcggtaggatcgtttgcggattccagtctgacccaaagacgggtgcaccttcaagggtagaacagtttaaggaagtcataaatgaggcgtcatattttatgtcaacaagtccagtctccgataacgtaccaatgttgggatggatcgaccaattgaccggtctgacgaggaacatgaagcattgtgggaagaagcttgacttagtagtggagtcaattatcaaggaccataggcaaaagagacgtttttcacgtacaaaaggtggcgatgagaaggatgacgaacaggacgactttattgatatttgcttgagcatcatggagcagccacagttgcccgggaacaattctccccctcaaattccgatcaaatctatcgtgctagacatgattgggggtggtaccgacactacgaaacttacaaccatatggaccctatcacttttgttgaacaatcctcacgtgttagataaagctaaacaagaggtcgacgctcactttcgtaaaaagagaagatcaacagatgacgcagcagcggcagtcgttgattttgacgacataagaaatttagtatacatccaagccatcattaaagaaagtatgaggctttatccagccagcccggtggttgagcgtctttccggcgaggattgcgttgttggaggttttcacgtgcctgctggtacgagactatgggctaacgtttggaagatgcaaagagatcccaaagtttgggacgatcctctagtattcagacctgaaaggtttttgagcgacgagcaaaagatggtagacgttcgtggccaaaactatgaacttctgccattcggcgcaggaagaagaatctgtccaggcgtttcctttagtcttgaccttatgcaacttgtcctaaccaggttaatcctagagttcgaaatgaagtccccgtccggcaaggtagatatgaccgcaactccaggactaatgtcttacaaggtggttccattggacatattgctgactcaccgtcgtatcaagtcatgcgttcaattggcgtcttctgaacgtgattaagcgaatttcttatgatttatgatttttattattaaataagttataaaaaaaataagtgtatacaaattttaaagtgactcttaggttttaaaacgaaaattcttattcttgagtaactctttcctgtaggtcaggttgctttctcaggtagagcgttggttggtggatcaagcccacgcgtaggcaatcctcgagcagatccgccaggcgtgtatatatagcgtggatggccaggcaactttagtgctgacacatacaggcatatatatatgtgtgcgacaacacatgatcatatggcatgcatgtgctctgtatgtatataaaactcttgttttcttcttttctctaaatattctttccttatacattaggacctttgcagcataaattactatacttctatagacacacaaacacaaatacacacactaaattaataatggaaagttctggggtgcctgtgatcacattgtcctcaggtaaagtaatgcccgtactgggcatgggaaccttcgaaaaggtgggtaaggggtctgaacgtgagcgtttagccattcttaaagcgatcgaagttggttaccgttactttgataccgcagcggcatatgaaacggaagaagttctaggggaagccattgctgaagctttacaattgggtctgatagagagccgtgacgagctgttcatcagctcaatgctttggtgcaccgacgcacatccagaccgtgtgctacttgctctgcaaaacagtctgagaaatctaaaacttgaatatctagacctatatatgttgccgtttcctgccagccttaagccgggcaaaattacgatggatattcctgaggaggatatttgccgtatggattatcgttcagtctggagcgccatggaagagtgtcaaaacttaggatttactaaaagtattggtgtaagcaacttttcttgcaagaaattacaagaattaatggccactgcaaatatcccgcccgcggtaaatcaagtagagatgtcaccagctttccaacagaaaaaactgagggaatattgtaacgcaaacaacatattggtatccgcagtaagcattctgggatcaaacgggacgccctggggtagtaatgctgttcttggaagcgaagttttgaaacagatcgcgatggcgaaaggcaaaagcgttgcgcaagtcagtatgaggtgggtctatgagcagggcgcgtctttagtagtcaagagtttctctgaagaacgtttaagagaaaacctgaatatttttgactgggagcttacgaaagaagacaatgagaagataggcgaaatcccgcaatgtagaatccttactgcgtacttccttgtctccccgaacggcccgtttaaatctcaggaagagctttgggatgacaaggcataaacaggccccttttcctttgtcgatatcatgtaattagttatgtcacgcttacattcacgccctcctcccacatccgctctaaccgaaaaggaaggagttagacaacctgaagtctaggtccctatttattttttttaatagttatgttagtattaagaacgttatttatatttcaaatttttcttttttttctgtacaaacgcgtgtacgcatgtaacattatactgaaaaccttgcttgagaaggttttgggacgctcgaaggctttaatttgtaatcattatcactttacgggtcctttccggtgatccgacaggttacggggcggcgacctcgcgggttttcgctatttatgaaaattttccggtttaaggcgtttccgttcttcttcgtcataacttaatgtttttatttaaaatacctcgcgagtggcaacactgaaaatacccatggagcggcgtaaccgtcgcacaggatctaggtgaagatcctttttgataatctcatgaccaaaatcccttaacgtgagttttcgttccactgagcgtcagaccccgtagaaaagatcaaaggatcttcttgagatcctttttttctgcgcgtaatctgctgcttgcaaacaaaaaaaccaccgctaccagcggtggtttgtttgccggatcaagagctaccaactctttttccgaaggtaactggcttcagcagagcgcagataccaaatactgtccttctagtgtagccgtagttaggccaccacttcaagaactctgtagcaccgcctacatacctcgctctgctaatcctgttaccagtggctgctgccagtggcgataagtcgtgtcttaccgggttggactcaagacgatagttaccggataaggcgcagcggtcgggctgaacggggggttcgtgcacacagcccagcttggagcgaacgacctacaccgaactgagatacctacagcgtgagctatgagaaagcgccacgcttcccgaagggagaaaggcggacaggtatccggtaagcggcagggtcggaacaggagagcgcacgagggagcttccagggggaaacgcctggtatctttatagtcctgtcgggtttcgccacctctgacttgagcgtcgatttttgtgatgctcgtcaggggggcggagcctatggaaaaacgccagcaacgcggcagtggaacgtgcattatgaattagttacgctagggataacagggtaatatagaacccgaacgaccgagcgcagcggcggccgcgctgataccgccgc

SEQ ID NO: 30 - protein, 153 aa, Papaver bracteatum
MAPRGVSGLVGKLSTELDVNCDAEKYYNMYKNGEDVQKAVPHLCMDVKVISGDATRSGCIKEWNVNIDGKTIRSVEETTHNDETKTLRHRVFEGDMMKDYKKFDTIMEVNPKPDGNGCVVTRSIEYEKVNENSPTPFDYLQFGHQAMEDMNKY

SEQ ID NO: 31 - protein, 144 aa, Papaver setigerum
MLVGKLSTELEVDCDAEKYYNMYKHGEDVKKALCVDVKVISGDPTRSGCIKEWNVNIDGKTIRSVEETTHNDETKTLRHRVFEGDMMKDFKKFDTIMVVNPKPDGNGCVVTRSIEYEKTNENSPTPFDYLQFGHQAIEDMNKYL

SEQ ID NO: 32 - protein, 141 aa, Papaver setigerum
MLVGKLSTELEVDCDAEKYYNMYKHGEDKRQCVDVKVISGDPTRSGCIKEWNVNIDGKTIRSVEETTHNDETKTLRHRVFEGDMMKDFKKFDTIMVVNPKPDGNGCVVTRSIEYEKTNENSPTPFDYLQFGHQAIEDMNKY

SEQ ID NO: 33 - protein, 147 aa, Papaver setigerum
MLVGKLSTELEVDCDAEKYYNMYKHGEDVKKAVPHLCVDVKIISGDPTSSGCIKEWNVNIDGKTIRSVEETTHDDETKTLRHRVFEGDVMKDFKKFDTIMVVNPKPDGNGCVVTRSIEYEKTNENSPTPFDYLQFGHQAIEDMNKYL

SEQ ID NO: 34 - protein, 109 aa, Papaver setigerum
MVKIISGDPTSSGCIKEWNVNIDGKTIRSVEETTHDDETKTLRHRVFEGDVMKDFKKFDTIMVVNPKPDGNGCVVTRSIEYEKTNENSPTPFDYLQFGHQAIEDMNKYL

SEQ ID NO: 35 - protein, 180 aa, Papaver somniferum
MDSINSSIYFCAYFRELIIKLLMAPPGVSGLVGKLSTELEVNCDAEKYYNMYKHGEDVQKAVPHLCVDVKVISGDPTRSGCIKEWNVNIDGKTIRSVEETTHNDETKTLRHRVFEGDVMKDFKKFDTIMVVNPKPDGNGCVVTRSIEYEKTNDNSPTPFDYLQFGHQAIEDMNKYLRDSE

SEQ ID NO: 36 - protein, 164 aa, Papaver somniferum
MNFFIKDHLYICLVGKLSTELEVDCDAEKYYNMYKHGEDVKKAVPHLCVDVKIISGDPTSSGCIKEWNVNIDGKTIRSVEETTHDDETKTLRHRVFEGDVMKDFKKFDTIMVVNPKPDGNGCVVTRSIEYEKTNENSPTPFDYLQFGHQAIEDMNKYLRDSESN

SEQ ID NO: 37 - protein, 160 aa, Papaver somniferum
MAPLGVSGLVGKLSTELEVDCDAEKYYNMYKHGEDVKKAVPHLCVDVKIISGDPTSSGCIKEWNVNIDGKTIRSVEETTHDDETKTLRHRVFEGDVMKDFKKFDTIMVVNPKPDGNGCVVTRSIEYEKTNENSPTPFDYLQFGHQAIEDMNKYLRDSESN

SEQ ID NO: 38 - protein, 400 aa, Papaver somniferum
MMKVCVSSREKIKPSRPTPGHLKTHKLSFLDQVAARIYVPLLLYYAGNKENVDTDTRCNIIKKSLAETLTKFYILAGKIVNDEIERFVNCNDDGVDFCVTKVSNCQLFQVIKRPDIFDQVTLFLPFDPCDNEITASGDFLLSVQVNVFEDCRGMVIGLCINHKVADASSITTFVNYWATIARGLVLNVDDRQIQDPCFQVQSIFPQKEKGIGFKISSSSIDGTLVTKKFGFEASKLAELKERCKFAGATEDIRGGYKPNRVEALSTFLWKCFIDIDQAKTKAAAPARVYLASNAVNIRSRIVPQLPTSSFGNMVAITDAIFTVNSNENNGINDPYYPKLVQKFRDAVKRVDGEYIEALQSTDLLLNNVTKLFKHILNGQTLSISFTSWCRFPFYDTDLLD

SEQ ID NO: 39 - protein, 386 aa, Papaver somniferum
MKVQVISKELIKPSTPTPPRLRNFKLSLLDQLLPPFYVPIIIFYPANDDHESNNNDQCIKANILKKSLSETLTRFYPIAGRIRDKILVECNDEGVHYIEAKVNAVMSDFMSLDVIHQLHPSYITLDDLAEEAQLAVQVTMFDCGGIALSICSSHKIIDGCTSTTFLNSWAATARAPSNPEIVYPTFDAAAIFPAQPSGVQVSTLESDDRLQGENVVTKRFLFSASKITALRARIAESRSSNILSKYPSRSEAVSALVWKSFMETSRVKVTREHTFSAEASTKPIVRSIANFVVNLRTRLNPPLPNVSFGNIIMDATAESLIIDNGENTLGFVETLDGLISQLRLGVTKMDDEYVRKLREDDVEFLKSLDEASHPSNGEGDGNGERV

SEQ ID NO: 40 - protein, 525 aa, Papaver setigerum
MNDTMKIEVVSKESIKPSYPTPNNLKIHNLSNLDQLIPAFYMDHILYYPSLDSNDSSLGDDEEDKKMIFSASSRHRCDVVKKSLAETLTRYYPLAGRIKDEKSVECNDEGVDYIEARVVGITVSQVIQLASSDIEVMEPFLPYEPYGGTGSAFRRAGIHSNSKPLLKIQVNVFDCGGMVICLSGSHKVIDATSILNFVNDWAATARGGFDTHDDELKVAVVDKPCYIFSSMFPPTSFGNQEEKDTADQAQLVPDRIEIVTKRFVFKDSSIAKLKKKCIHVNTNNGSDHQVDKQEHNMQQMPSRIEALTSLIWMCFMDVDRRFRVKQIDDAVSPVNTVNEVSLPKQVQYVAGFAINLRTRTIQPLPTNSFGNMTDTAIAEVTLNLTGSDHFNNEKGIRDQSQNYPELVSKIKDSIKLVDNKHIEAMKRNLAISCNNIKMHQMMKESTFDQNTRELLMFSSWCRFPIYEADFGWGKPSWASITKLLYKNCVMFLDTSSGDGIEAWVSLKEEDMVEFERHEELVALAS

SEQ ID NO: 41 - protein, 459 aa, Papaver somniferum
MKVQVISKEIIKPSSPTPPHLRNFKLSLLDQILPPFYVPIVMFYPAGDDYVTNNNIHDQSSKSEFLKKSLSETLTRFYPIAGRIKDNILIDCNNEGVDYIEAKVNGIMSDFMSVDVVHQLHPSHIMLDDVAKEAQLAVQVNLFDCGGIAISISMSHKIVDACTAITFINGWAATARAAPKQEIVCPTFDSAAIFPALPPGVQVSSLESDDSVQGVNVVTKMFAFTAPKIASLRARIAELRSSSDGLSKYPTRTEALSALVWKSFIRTSRVKAARKYSLSPASTKPVIKSVANYAVNLRTRLNPPLPQVSFGNILMDATAESTTTIDDDDSHEFADTLAGLIGQLRLGVSRINGDYIRKLQEGDLAFLKSLDEASHDSNGEKVQICWISSLCRFPFYEADFGWGKPSWVALNTNAEYKNSLFLMDTKCGTGIEAWVSLEEDDMAIFEEDQDLLQCVKSIN

SEQ ID NO: 42 - protein, 477 aa, Papaver setigerum
MENMKVEVVLKQTIKPSTQTPLHSKTFNLSFLDQHLGPPIYIPFTLYYESGDVNNKNNHCDGYKNNLEEACEHRVSVIKQSLSETLARYYPLAGRMKEDNLAVECNDEGVEYFETRVSDVRLSQVIKRSPNHNSVLRKFLPPCISSCDNSMSIPFDYGFKSKTLLAIQVNIFECGGIVIGMCMAHRLADASTMFTFITDWAATARGAIEDIKGPSFDFSYTLFPQKDVINNFKPFDPMLTREEDLVTKYFVFPASKIVELKRRNVNNIVCQDTSQQNTSPCTRVEAVTSFMWKRYMDSVRAKNQTQATSVEKYGALYTVNLRSRITPPLPANSFGNIYTFTIALSTPSDENDIDDGLRKDVSSPNDLNLVGKVRDAIKKIDDKYTRKLQSSEDELVNDVKPLTSGEAIFLGFSSWCRFPIYEADFGWGKPTWVSIGTMALRNTVFLMDTKSGDGIEAFVNMAKEDMDNFEVKLLADQ

SEQ ID NO: 43 - protein, 485 aa, Papaver setigerum
MENMKVEVVLEQTIKPSTQTPLHSKTFNLSFLDQHLGPPIYIPFTLYYESGDVNNKNNHCDGYKNNLEEVCEHRVSVIKQSLSETLARYYPLAGRMKEDNLAVECNDEGVEYFETRVSDVRLSQVIKRSPNHNSVLRKFLPPCISSCDNSMSIPFDYGFKSKTLLAIQVNIFECGGIVIGMCMAHRLADASTMFTFITDWAATARGAIEDIKGPSFDFSYTLFPQKDVINNFKPFDPMLTREEDLVTKYFVFPASKIVELKRRNVNNIVCQDTSQQNTSPCTRVEAVTSFMWKRYMDSVRAKNQTQATSVEKYGALYTVNLRSRITPPLPANSFGNIYTFTIALSTPSDENDIDDGLRKDVSSPNDLNLVGKVRDAIKKIDDKYTRKLQSSEDELVNDVKPLTSGEAIFLGFSSWCRFPIYEADFGWGKPTWVSIGTMALRNTVFLMDTKSGDGIEAFVNMAKEDMDNFEVKLLADQLLHVHPTV

SEQ ID NO: 44 - protein, 452 aa, Papaver setigerum
MSSTVEVISKQTIKPSTPTPIQRKNHSLSLIDQHFAPIYIPIVLFYPAAAVNDTGNVQHGDNTCVLKRSLSETLVHFYPLAGRMKDNIVVDCNDQGVEFTEVKVSGTMCDFLMKPDEQLSGLLPSEAVCMNFVREAQVMIQVNTFDCGSKAISLCVSHKIADASTITTFSRCWAETTIAVSKSTSAVTPIVSSKFHPTFDAASLFPPIKQLISPSGVTPALPELIPSEESKFGKIISKRFLFSATTINSVREKLSALMADKLKYRRLTRVEVVSALIWNSFDKLATTGSVAVMVKHAVNLRKRIDPPLPDVSFGNILEFTKAVVGEAAANTTTQGTVGSSSKLLEELSEFAGQLREPVSKMNKGDHDFDMENTDYEERDLWMSSWCNYGLYDIDFGCGKPVWVTTVATMYPYSDGFFMNDTRCGQGIEVWGNLVEEDMANFQLNLSELLDRI

SEQ ID NO: 45 - protein, 451 aa, Papaver somniferum
MMKVCVSSREKIKPSRPTPGHLKTHKLSFLDQVAARIYVPLLLYYAGNKENVDTDTRCNIIKKSLAETLTKFYILAGKIVNDEIERFVNCNDDGVDFCVTKVSNCQLFQVIKRPDIFDQVTLFLPFDPCDNEITASGDFLLSVQVNVFEDCRGMVIGLCINHKVADASSITTFVNYWATIARGLVLNVDDRQIQDPCFQVQSIFPQKEKGIGFKISSSSIDGTLVTKKFGFEASKLAELKERCKFTTEPEDGYKPTRVEALSAFLWKCFIDIDQAKLKGVARTKVYLATNAVNMRSRMVPQLPTSSFGNIISITDAVFSINNDDSTGINDPYYPKLVRKFRDAIKKIDRDYIEALRSTDLLLNNMMKLIEHVLSGHTLSIYFSSWCRFPLYETDFGWGKPIWVSTCTIPQKNVIVLMDSNSSADGIEAYVTLAKEDMGELEHHEELLALIS

SEQ ID NO: 46 - protein, 232 aa, Papaver somniferum
MGAMKFFSFLAVAMVLSLAHIQAQQGNWGDETVPYTMGPEKITKLRFYFHDIVTGNNPTAVQIAQATGTNSSSTLFGALFMIDDPLTEGPDPDSRLVGRAQGFYGSAGQNEAALILGMSLVFTGNEKFNGSTISVLSRNPVTHTEREFAIVGGTGYFQFARGFISAKTYSLVGPNAVVEYNCTIVHPSSVSESGKSNSSPGKSDSNSGSQISLGSNLVFVSVIAYVTIILSL

SEQ ID NO: 47 - protein, 224 aa, Papaver setigerum
MVLSMSHSQAQEGNWGDESVPYTMGPEKMTKLRFYFHDIITGNSPTAVQIAQATGTNTSATMFGALMMIDDPLTEGPDPNSRLVGRAQGFYGSAGQNELALILGMSLVFTGNEKFNGSTISVLSRNPVMHTEREFAIVGGTGYFQFARGFISAKTYSLVGPNAVVEYNCTIVHPSSVSESGKSDSSSGKSDSSSGSQISLGTNLVFLSVIAFVTIIVSPQHFSW

SEQ ID NO: 48 - protein, 210 aa, Papaver somniferum
MTKTVLVDDIPFPQNITTVTTEKQLPLLGQGITDMEIHFLQIKFTAIGTAIGVYLEPEIASHLQQWKGKTGAELSQDDEFFAAVVSASVEKYVRVVVIKEIKGSQYMLQLESWVRDELAAADKYEDEEEESLDKVIEFFQSKYLKQLSFIPSHFSATTPAVAEIGLEIEGQKDLKIKVENGNVIEMIQKWYLGGTRGVSPSTTQSLATSL

SEQ ID NO: 49 - protein, 210 aa, Papaver somniferum
MPFLKAIEIEGCKFRPFVTPPGSTQILFLAGSGVKEEFGDSKSMKYSSCAIYLQPTCILYLAKAWAQKSVVDITQSLNFFMDIATGPFEKYCRITMLETAKGEDYAAMITKNCEEMLTNSKRYSETAKAALTKFSEAFNGRTLASGSSIHVTVSTSNSVTLAFTEDGSTPKQGDVTLDCKEVGEAFLMSTISLHTTIRESMGSRISGLYK

SEQ ID NO: 50 - protein, 166 aa, Papaver setigerum
MAPMAQLSEIQVEQFVFPPTMTPPSSTESLFLGGAGVRGLQIQDRFIKFTAIGVYLAEEAIPSLSPKWKSKSPEELTDDVEFFMDIVTGPFEKFVKITMILPLTGDQYAEKVTENCIQYLKSKDMYTDAEAKAVERFIEIFKNEMFPPASSILFTISPAGSLTVGF

SEQ ID NO: 51 - protein, 160 aa, Papaver rhoeas
MVYLEPEIATHLKQWKGKTGAELSQDDDFFSAVVSAPVEKYVRVVVIKEIKGSQYMLQLESWVRDELAAADKYEDEEEESLDKVIEFFQSKYLKQHSVIITFHFSATTPAVAEIGLEIEGQKDLKIKVENGNVVEMIQKWYLGGTRGVSPSTTQSLATSL

SEQ ID NO: 52 - protein, 206 aa, Papaver bracteatum
MTKMVLVDDIPFPQNITTATTAKQLPLLGQGITDMEIHFLQIKFTAIGVYLEPEIASHLKQWKGKTGAELSQDDEFFSAIVSAPVEKYVRVVVIKEIKGSQYMLQLESWVRDELAAADKYEDEEEESLEKVIEFFQSKYLKQHSVIPFHFSATTPAVAEIGLEIEGHKDLKMKVENGNVVEMIQKWYLAGTRGVSPSTTQSLATSL

SEQ ID NO: 53 - protein, 216 aa, Papaver bracteatum
MAPMAQLSEIQVEQFVFPPTMTPPSSTESLFLGGAGVRGLQIQDRFIKFTAIGVYLAEEAIPSLSPKWKSKTPEELTNDVEFFMDIVTGPFEKFVKITMILPLTGDQYAEKVTENCVEYLKSKDLYTDAEAKAVERFIEIFKNEMFPPASSILFTISPTGSLTVGFSKDTSIPEARNAVIENKALSESILESIIGKNGVSPAAKQSLAERISELLK

SEQ ID NO: 54 - protein, 151 aa, Panax ginseng
MGLTGKLICQTGIKSDGDVFHELFGTRPHHVPNITPANIQGCDLHEGEFGKVGSVVIWNYSIDGNAMIAKEEIVAIDEEDKSVTFKVVEGHLFEEFKSIVFSVHVDTKGEDNLVTWSIDYEKLNESVKDPTSYLDFLLSVTRDIEAHHLPK

SEQ ID NO: 55 - protein, 157 aa, Arachis hypogaea
MGVFTFEDEITSTVPPAKLYNAMKDADSITPKIIDDVKSVEIVEGNGGPGTIKKLTIVEDGETKFILHKVESIDEANYAYNYSVVGGVALPPTAEKITFETKLVEGPNGGSIGKLTLKYHTKGDAKPDEEELKKGKAKGEGLFRAIEGYVLANPTQY

SEQ ID NO: 56 - protein, 166 aa, Hypericum perforatum
MGIDPFTMAAYTIVKEEESPIAPHRLFKALVLERHQVLVKAQPHVFKSGEIIEGDGGVGTVTKITFVDGHPLTYMLHKFDEIDAANFYCKYTLFEGDVLRDNIEKVVYEVKLEAVGGGSKGKITVTYHPKPGCTVNEEEVKIGEKKAYEFYKQVEEYLAANPEVFA

SEQ ID NO: 57 - protein, 158 aa, Lupinus luteus
MGVFTFQDEYTSTIAPAKLYKALVTDADIIIPKAVETIQSVEIVEGNGGPGTIKKLTFIEGGESKYVLHKIEAIDEANLGYNYSIVGGVGLPDTIEKISFETKLVEGANGGSIGKVTIKIETKGDAQPNEEEGKAAKARGDAFFKAIESYLSAHPDYN

SEQ ID NO: 58 - protein, 161 aa, Fragaria x ananassa
MAGVFTYETEFTSVIPPPRLFKAFILDADNLIPKIAPQAVKCAEIIEGDGGVGTIKKITFGEGSQFGSVTHKIDGIDKENFVYSYSLIEGDALSDKIEKISYETKLVSSSDGGSIIKSTSNYHTKGDVEIKEEHVKAGKEKFSHLFKLVEGYLLANPNEYC

SEQ ID NO: 59 - protein, 150 aa, Actinidia deliciosa
MDLSGKMVKQVEILSDGIVFYEIFRYRLYLISEMSPVNIQGVDLLEGNWGTVGSVIFFKYTIDGKEKTAKDIVEAIDEETKSVTFKIVEGDLMELYKTFIIIVQVDTKGEHNSVTWTFHYEKLKEDVEEPNTLMNFCIEITKDIETYHLK

SEQ ID NO: 60 - protein, 164 aa, Thalictrum flavum
MGIINQVSTVTKVIHHELEVAASADDIWTVYSWPGLAKHLPDLLPGAFEKLEIIGDGGVGTILDMTFVPGEFPHEYKEKFILVDNEHRLKKVQMIEGGYLDLGVTYYMDTIHVVPTGKDSCVIKSSTEYHVKPEFVKIVEPLITTGPLAAMADAISKLVLEHKS

SEQ ID NO: 61 - protein, 155 aa, Vigna radiata
MVKEFNTQTELSVRLEALWAVLSKDFITVVPKVLPHIVKDVQLIEGDGGVGTILIFNFLPEVSPSYQREEITEFDESSHEIGLQVIEGGYLSQGLSYYKTTFKLSEIEEDKTLVNVKISYDHDSDIEEKVTPTKTSQSTLMYLRRLERYLSNGSA

SEQ ID NO: 62 - protein, 153 aa, Papaver bracteatum; identical to SEQ ID NO: 30

SEQ ID NO: 63 - protein, 144 aa, Papaver setigerum; identical to SEQ ID NO: 31

SEQ ID NO: 64 - protein, 141 aa, Papaver setigerum; identical to SEQ ID NO: 32

SEQ ID NO: 65 - protein, 147 aa, Papaver setigerum; identical to SEQ ID NO: 33

SEQ ID NO: 66 - protein, 109 aa, Papaver setigerum; identical to SEQ ID NO: 34

SEQ ID NO: 67 - protein, 180 aa, Papaver somniferum; identical to SEQ ID NO: 35

SEQ ID NO: 68 - protein, 164 aa, Papaver somniferum; identical to SEQ ID NO: 36

SEQ ID NO: 69 - protein, 160 aa, Papaver somniferum; identical to SEQ ID NO: 37

SEQ ID NO: 70 - protein, 158 aa, Papaver setigerum
MAQNGDFGIVGKLVIELEVSSPADKFYTIFKHQKDVPKAIPHLFTDGKVIEGDARRSGCIKEWKYVLEGKTISVTEKTTHNDETKTLHHRIFEGDLMKDYKKFDSIIEVNPKPTGHGSIVTWSFVYEKINKNSPTPFAYLPFCYQAIEDINNHLAASE

SEQ ID NO: 71 - protein, 153 aa, Papaver setigerum
MAHHGVSGLVGKLVTQLEVNCDADKLYKIYVPKAISHLFTGVKVLEGHGLRSGCIKEWKYIIDGKALTAVEETTHGDETRTLKHRVIDGDLMKDYKKFEKIIEANPKPNGHGSIVTVSLLYEKINEDSPAPFDHLKFFHQNIEDMNSHICASE

SEQ ID NO: 72 - skipped

SEQ ID NO: 73 - protein, 152 aa, Papaver setigerum
MARHSVSGLVGKLVTELEVSSDAEKYYKVYKHAEDVEKAIPHLCTGIRVIKGEASRSGCIKEWNFILEGKAIRSIEETTHNDATRTVHHRIFEGNLMKDYKKFDSIIEVNGCIVARSIVYEKRSEDSPTPFAYILFCHQAIEDMNKHLCDNE

SEQ ID NO: 74 - protein, 201 aa, Papaver setigerum
MDSVSAALVFHSSIYLCAMAHHGVSGLVGKIVTELEVNCNADEFYKILKRDEDVPRAVSDLFPPVKIAKGDGLVSGCIKEWDCVLDGKAMSGKEETTHNDETRTLRHRELKKFDSIIEVNPKPNGHGSIVTWSIEYEKMNEDSPAPFAYLASFHQPNGHGSIVTWSIEYEKMNEDSPAPFAYLASFHQNVVEVDSHLCLSE

SEQ ID NO: 75 - protein, 184 aa, Papaver bracteatum
MYSVSAALVSIAPYTFVRTDNNLRLLMACDGVSGLVGKLVTELKVNCDADKYYQIYKRPDDLQKAIPHLCTGIKLINGDASRSGCIKEWNFTLEGKRIHTVEETTHNDETRTLHHRIFEGDLMKDYKKFDSIIEVNPKPNGNGCVVKRSIVYEKINKDSPTPFSYLPFCHQAIEDMNKHLCDSE

SEQ ID NO: 76 - protein, 158 aa, Papaver bracteatum
MACDGVSGLVGKLVTELKVNCDADKYYQIYKRPDDLQKAIPHLCTGIKLINGDASRSGCIKEWNFTLEGKRIHTVEETTHNDETRTLHHRIFEGDLMKDYKKFDSIIEVNPKPNGNGCVVKRSIVYEKINKDSPTPFSYLPFCHQAIEDMNKHLCDSE

SEQ ID NO: 77 - protein, 166 aa, Papaver bracteatum
MAHHGVSGLVGKLVTQLEVNCDADEFYKIWKHHEEVPQAVSHLFPAVKVVKGDGLVSGCIKEWDYILEGKAMSAMEETTHNDETRTLHHRIVEGEVMKDYKAIASIIEVNPNPNGHGSIVTWSIEYEKMNEDSPTPFAYLEFFHQNLVDMNSHLYVGSDSHLHVDE

SEQ ID NO: 78 - protein, 158 aa, Papaver rhoeas
MAPHGVSDLSGKLVTELEVSCDADKYYKIYKHAEDVQKAVPHLCTDVKVINGDATLSGCIKEWHYILEGKALSAKEETTINDETRTLHHRVLEGDMMKDYKKFDSVIEVNPKPNGNGSVVTRSIAYEKINEDSPTPFAYILFSHRAVEDMNKYLCDSE

SEQ ID NO: 79 - protein, 157 aa, Papaver rhoeas
MAPHGVSDLSGKLVTELEVSCDADKYYKIYKHAEDVQKAVPHLCTDVKVINGDATLSGCIKEWHYILEGKALSAKEETTINDETRTLHHRVLEGDMMKDYKKFDSVIEVNPKPNGNGSVVTRSIAYEKINEDPAPFAYLAFFHQNAVEVNSYLCLSE

SEQ ID NO: 80 - protein, 147 aa, Papaver rhoeas
MAPHGVSDLSGKLVTELEVSCDADKYYKIYKHAEDVQKAVPHLCTDVKVINGDATLSGCIKEWHYILEGKALSAKEETTINDETRTLHHRVLEGDMMKDYKKFDSVIEVNPKPNGNGSVVTRSIAYEKINEDSSSLCVSSFLPSERG

SEQ ID NO: 81 - protein, 159 aa, Papaver rhoeas
MAHHGVSGLVGKLVTQLEVNCDADKFYKMAKHHEDVPKAVPHFFTAVKVTEGDGLVSGCIKEWDYILEGKAMSCKEEEETTHYDETRTLHHRVFGGDMMMDYKKFDAIIEVNPKPNVHGCIVTWSIAYEKINEDSPVPFDYLAFYHQNIIDVGSHLCSE

SEQ ID NO: 82 - protein, 176 aa, Papaver somniferum
MDSVSAALVFHSSIYLCAMAHHGVSGLVGKIVTELEVNCNADEFYKILKRDEDVPRAVSDLFPPVKIAKGDGLVSGCIKEWDCVLDGKAMSGKEETTHNDETRTLRHRELEGDLMKDYKKFDSIIEVNPKPNGHGSIVTWSIEYEKMNEDSPAPFAYLASFHQNVVEVDSHLCLSE

SEQ ID NO: 83 - protein, 158 aa, Papaver somniferum
MAHHGVSGLVGKIVTELEVNCNADEFYKILKRDEDVPRAVSDLFPPVKIAKGDGLVSGCIKEWDCVLDGKAMSGKEETTHNDETRTLRHRELEGDLMKDYKKFDSIIEVNPKPNGHGSIVTWSIEYEKMNEDSPAPFAYLASFHQNVVEVDSHLCLSE

SEQ ID NO: 84 - protein, 162 aa, Papaver somniferum
MAHHGISGLVGKLVTQLEVNCDADEFYKIWKHHEEVPKAVSHLLPAVKVVKGDGLVSGCIKEWHYILEGKAMSAMEETTHNDETRTLHHQVVEGELMKDYKAIASIIQVNPNGSIVTWSIEYEKMNEDSPTPFAYLEFFHQNIIDMNSHLYVGSDSHLHVDE

SEQ ID NO: 85 - protein, 157 aa, Papaver somniferum
MAHHGVSGLVGKLVTELEVHCNADAYYKIFKHQEDVPKAMPHLYTGGKVISGDATRSGCIKEWNYILEGKALIAVEETTHDDETRTLTHRITGGDLTKDYKKFVKIVEVNPKPNGHGSIVTVSLVYEKMNEGSPTPFNYLQFVHQTIVGLNSHICAS

SEQ ID NO: 86 - protein, 158 aa, Papaver somniferum
MAHHGISGLVGKLVIGLEVNCDADKYYQIFKHAEDVQKAVPHHYDSIKVINGDAKSSGCIKEWNFIHEGKTFHTVEETTHNDETRTLHHRIFEGDLMKDYKKFDLIIEANPKPTGNGCVVTWTIEYEKINQDSPAPIAYLPFCNQVIEDMNKHLCDSE

SEQ ID NO: 87 - protein, 321 aa, Papaver somniferum
MESNGVPMITLSSGIRMPALGMGTAETMVKGTEREKLAFLKAIEVGYRHFDTAAAYQSEECLGEAIAEALQLGLIKSRDELFITSKLWCADAHADLVLPALQNSLRNLKLDYLDLYLIHHPVSLKPGKFVNEIPKDHILPMDYKSVWAAMEECQTLGFTRAIGVCNFSCKKLQELMAAAKIPPVVNQVEMSPTLHQKNLREYCKANNIMITAHSVLGAICAPWGSNAVMDSKVLHQIAVARGKSVAQVSMRWVYQQGASLVVKSFNEGRMKENLKIFDWELTAENMEKISEIPQSRTSSADFLLSPTGPFKTEEEFWDEKD

SEQ ID NO: 88 - protein, 321 aa, Papaver somniferum
MESNGVPMITLSSGIRMPALGMGTVETMEKGTEREKLAFLKAIEVGYRRFDTAAAYQTEECLGEAIAEALQLGLIKSRDELFITSKLWCADAHADLVLPALQNSLRNLKLDYLDLYLIHHPVSLKPGKFVNEIPKDHILPMDYKSVWAAMEECQTLGFTRAIGVCNFSCKKLQELMATANSPPVVNQVEMSPTLHQKNLREYCKANNIMITAHSVLGAIGAPWGSNAVMDSKVLHQIAVARGKSVAQVSMRWVYQQGASLVVKSFNEARMKENLKIFDWELTAEDMEKISEIPQSRTSSAAFLLSPTGPFKTEEEFWDEKD

SEQ ID NO: 89 - protein, 320 aa, Papaver somniferum
MESNGVPMITLSSGIRMPALGMGTAETMVKGTEREKLAFLKAIEVGYRHFDTAAAYQSEECLGEAIAEALQLGLIKSRDELFITSKLWCADAHADLVLPALQNSLRNLKLDYLDLYLIHHPVSLKPGKFVNEIPKDHILPMDYKSVWAAMEECQTLGFTRAIGVCNFSCKKLQELMATANSPPVVNQVEMSPTLHQKNLREYCKANNIMITAHSVLGAVGAAWGTNAVMHSKVLHQIAVARKSVAQVSMRWVYQQGASLVVKSFNEARMKEDLKIFDWELTAEDMEKISEIPQSRTSSAAFLLSPTGPFKTEEEFWDEKD

SEQ ID NO: 90 - protein, 321 aa, Papaver somniferum
MESNGVPMITLSSGIRMPALGMGTVETMEKGTEREKLAFLKAIEVGYRHFDTAAAYQTEECLGEAIAEALQLGLIKSRDELFITSKLWCADAHADLVLPALQNSLRNLKLDYLDLYLIHHPVSLKPGKFVNEIPKDHILPMDYKSVWAAMEECQTLGFTRAIGVCNFSCKKLQELMATANSPPVVNRVEMSPTLHQKNLREYCKANNIMITAHSVLGAVGAAWGTNAVMHSKVLHQIAVARGKSVAQVSMRWVYQQGASLVVKSFNEARMKENLKIFDWELTAEDMEKISEIPQSRTSSAAFLLSPTGPFKTEEEFWDEKD

SEQ ID NO: 91 - protein, 321 aa, Papaver somniferum
MESNGVPMITLSSGIRMPALGMGTAETMVKGTEREKLAFLKAIEVGYRHFDTAAAYQSEECLGEAIAEALQLGLIKSRDELFITSKLWCADAHADLVLPALQNSLRNLKLEYLDLYLIHHPVSLKPGKFVNEIPKDHILPMDYKSVWAAMEECQTLGFTRAIGVCNFSCKKLQELMATANSPPVVNQVEMSPTLHQKNLREYCKANNIMITAHSVLGAVGAAWGTNAVMHSKVLHQIAVARGKSVAQVSMRWVYQQGASLVVKSFNEARMKENLKIFDWELTAEDVEKISEIPQSRTSSAAFLLSPTGPFKTEEEFWDEKD

SEQ ID NO: 92 - protein, 321 aa, Papaver somniferum
MESNGVPMITLSSGIRMPALGMGTVETMEKGTEREKLAFLKAIEVGYRHFDTAAAYQTEECLGEAIAEALQLGLIKSRDELFITSKLWCADAHADLVLPALQNSLRNLKLDYLDLYLIHHPVSLKPGKFVNEIPKDHILPMDYKSVWAAMEECQTLGFTRAIGVCNFSCKKLQELMATANSPPVVNQVEMSPTLHQKNLREYCKANNIMITAHSVLGAVGAAWGTNAVMHSKVLHQIAVARGKSVAQVSMRWVYQQGASLVVKSFNEARMKENLKIFDWELTAEDMEKISEIPQSRTSSADFLLSPTGPFKTEEEFWDEKD

SEQ ID NO: 93 - protein, 321 aa, Papaver setigerum
MESNGVPMITLSSGIRMPALGMGTVETMEKGTEREKLAFLKAIEVGYRHFDTAAAYQTEECLGEAIAEALQLGLIKSRDELFITSKLWCADAHADLVLPALQNSLRNLKLDYLDLYLIRHPVSLKPGKFVNEIPKDHILPMDYKSVWAAMEECQTLGFTRAIGVCNFSCKKLQELMATVNSPPVVNQVEMSPTLHQKNLREYCKANNIMITAHSVLGAVGAAWGTKAVMHSKVLHQIAVARGKSVAQVSMRWVYQQGASLVVKSFNEARMKENLKIFDWELTAEDMEKISEIPQSRTSSAAFLLSPTGPFKTEEEFWDEKD

SEQ ID NO: 94 - protein, 321 aa, Papaver bracteatum
MESNGVPMITLSSGIRMPALGMGTVETMEKGTEREKLAFLKAIEVGYRHFDTAAAYQTEECLGEAIAEALQLGLIKSREELFITSKLWCTDAHADLVLPALQNSLRNLKLEYLDLYLIHFPVSLKPGKIVSDIPKDQMLPMDYKSVWVAMEECQTLGFTRAIGVSNFSCKKLQELMATANSPPVVNEVEMSPVFQQKNLRAYCKANNIMITAYSVLGARGAAWGSNAVMDSKVLHEIAVARGKSVAQVSMRWVYQQGACLVVKSFNEERMKENLKIFDWELSAEDMEMISEIPQCRTSSADFLLSPTGPFKTEEEFWDEKD

SEQ ID NO: 95 - protein, 321 aa, Unknown
  Description of Unknown: COR 1.3 Mutant sequence
MESNGVPMITLSSGIRMPALGMGTAETMVKGAEREKLAFLKAIEVGYRHFDTAAAYQSEECLGEAIAEALQLGLIKSRDELFITSKLWCADAHADLVLPALQNSLRNLKLDYLDLYLIHHPVSLKPGKFVNEIPKDHILPMDYKSVWAAMEECQTLGFTRAIGVCNFSCKKLQELMAAAKIPPVVNQVEMSPTLHQKNLREYCKANNIMITAHSVLGAICAPWGSNAVMDSKVLHQIAVARGKSVAQVSMRWVYQQGASLVVKSFNEGRMKENLKIFDWELTAENMEKISEIPQSRTSSADFLLSPTGPFKTEEEFWDEKD

SEQ ID NO: 96 - protein, 321 aa, Unknown
  Description of Unknown: COR 1.3 Mutant sequence
MESNGVPMITLSSGIRMPALGMGTAETMVKGTEREKLAFLKAIEVGYRHFDTAAAYQSEECLGEAIAEALQLGLIKSRDELFITSKLWCADAHADLVLPALQNSLRNLKLDYLDLYLIHHPVSLKPGKFVNEIPKDHILPMDYKSVWAAMEECQTLGFTRAIGVCNFSCKKLQELMAAAKIPPVVNQVEMSPTLHQKNLREYCKANNIMITAHSVLGAICAPWGSNAVMDFKVLHQIAVARGKSVAQVSMRWVYQQGASLVVKSFNEGRMKENLKIFDWELTAENMEKISEIPQSRTSSADFLLSPTGPFKTEEEFWDEKD

SEQ ID NO: 97 - protein, 364 aa, Papaver sp.
MEKAKLMKLGNGMEIPSVQELAKLTLAEIPSRYVCANENLLLPMGASVINDHETIPVIDIENLLSPEPIIGKLELDRLHFACKEWGFFQVVNHGVDASLVDSVKSEIQGFFNLSMDEKTKYEQEDGDVEGFGQGFIESEDQTLDWADIFMMFTLPLHLRKPHLFSKLPVPLRETIESYSSEMKKLSMVLFNKMEKALQVQAAEIKGMSEVFIDGTQAMRMNYYPPCPQPNLAIGLTSHSDFGGLTILLQINEVEGLQIKREGTWISVKPLPNAFVVNVGDILEIMTNGIYHSVDHRAVVNSTNERLSIATFHDPSLESVIGPISSLITPETPALFKSGSTYGDLVEECKTRKLDGKSFLDSMRI

SEQ ID NO: 98 - protein, 360 aa, Papaver sp.
METPILIKLGNGLSIPSVQELAKLTLAEIPSRYTCTGESPLNNIGASVTDDETVPVIDLQNLLSPEPVVGKLELDKLHSACKEWGFFQLVNHGVDALLMDNIKSEIKGFFNLPMNEKTKYGQQDGDFEGFGQPYIESEDQRLDWTEVFSMLSLPLHLRKPHLFPELPLPFRETLESYLSKMKKLSTVVFEMLEKSLQLVEIKGMTDLFEDGLQTMRMNYYPPCPRPELVLGLTSHSDFSGLTILLQLNEVEGLQIRKEERWISIKPLPDAFIVNVGDILEIMTNGIYRSVEHRAVVNSTKERLSIATFHDSKLESEIGPISSLVTPETPALFKRGRYEDILKENLSRKLDGKSFLDYMRM

SEQ ID NO: 99 - protein, 364 aa, Papaver somniferum
MEKAKLMKLGNGLSIPSVQELAELTFAEVPSRYVCTNDENLLLMTMGASEIDDETVPVIDLQNLLSPEPAIGKSELDWLHYSCKEWGFFQLVNHGVDALLVDHVKSEIHSFFNLPLNEKTKYGQRDGDVEGFGQAFLVSENQKLDWADMFFINTLPLHLRKPHLFPNLPLPLRETIESYSSEMKKLSMVLFEMMGKAIEVIDIKEAITEMFEDGMQSMRMNYYPPCPQPERVIGITPHSDFDGLTILLQLNEVEGLQIRKEDKWISIKPLPDAFIVNVGDIWEIMTNGVHRSVDHRGVINSTKERLSIATFHSPKLELEIGPISSLIRPETPAVFKSAGRFEDLLKEGLSRKLDGKSFLDCMRM

SEQ ID NO: 100 - protein, 294 aa, Papaver somniferum
MEKAKLMKLGNGMEIPSVQELAKLTLAEIPSRYVCANENLLLPMGASVINDHETIPVIDIENLLSPEPIIGKLELDRLHFACKEWGFFQVVNHGVDASLVDSVKSEIQGFFNLSMDEKTKYEQEDGDVEGFGQGFIESEDQTLDWADIFMMFTLPLHLRKPHLFSKLPVPLRETIESYSSEMKKLSMVLFNKMEKALQVQAAEIKGMSEVFIDGTQAMRMNYYPPCPQPNLAIGLTSHSDFGGLTILLQINEVEGLQIKREGTWISVKPLPNAFVVNVGDILEIMTNGIYHSVD

SEQ ID NO: 101 - protein, 364 aa, Papaver somniferum
METAKLMKLGNGMSIPSVQELAKLTLAEIPSRYICTVENLQLPVGASVIDDHETVPVIDIENLISSEPVTEKLELDRLHSACKEWGFFQVVNHGVDTSLVDNVKSDIQGFFNLSMNEKIKYGQKDGDVEGFGQAFVASEDQTLDWADIFMILTLPLHLRKPHLFSKLPLPLRETIESYSSEMKKLSMVLFEKMEKALQVQAVEIKEISEVFKDMTQVMRMNYYPPCPQPELAIGLTPHSDFGGLTILLQLNEVEGLQIKNEGRWISVKPLPNAFVVNVGDVLEIMTNGMYRSVDHRAVVNSTKERLSIATFHDPNLESEIGPISSLITPNTPALFRSGSTYGELVEEFHSRKLDGKSFLDSMRM

SEQ ID NO: 102 - protein, 369 aa, Papaver bracteatum
METPKSIKLGGSLLVPSVQELAQQSFAEVPARYVRDDLEPLTDLSGVSMIDQTIPVIDLQKLQSPVPIIRELESEKLHSACKEWGFFQVVNHGVDILLVEKTKSEIKDFFNLPMDEKKKFWQEEGDIQGFGQAFVQSEDQKLDWADIFLMVTLPRHTRNPRLFPKLPLPLRNTMDSYSSKLSKLASTLIEMMGKALHMETSVLAELFEDGRQTMRINYYPPCPQPKDVIGLTPHSDGGGLTILLQLNEVDGLQIRKEKIWIPIKPLPNAFVVNIGNILEIMTNGIYRSVEHRATIHSTKERLSVAAFHNPKVGVEIGPIVSMITPESPALFRTIEYDDYGKKYFSRKLDGKSSLDFMRIGEGDEENKAT

SEQ ID NO: 103 - protein, 366 aa, Papaver bracteatum
METPKLIKLGGSLLVPSVLELTKQSPAEVPARYIRNDLEPMTDLSSASLTDQTIPVIDLQNLLSPEPELELEKLHSGCKEWGFFQVMNHGVDILLVEKVKSEIQGFFNLPIDEKNKFWQEEGDLEGYGKAFVHSEDEKLDWADMFFILTQPQYMRKPRVFPKLPLRLRETIESYSLELSKLGLTLLDLMGKALQIETGVMSELFEDGRQTMRMNYYPPCPQPEHVIGLTPHSDGGALTILLQLNQVDGLQIRKEEIWVPIKPLPNAFVVNIGDILEIMSNGVYRSVEHRATINSSKERLSVAIFQSPKHGTEIGPILSMITPEAPALFKTIPYEDYLRKFFSRKLGGKSFVDSMRIGESDEDNNTA

SEQ ID NO: 104 - protein, 366 aa, Papaver bracteatum
METQKQENFGASLSVPNVQELAKQSPEQVPDRYIRSDQDSSTNISCPSMTDQIPVIDLQSLLSPDPIIGELELERLHSACKEWGFFQVVNHGVDNLLVEKVKSEIQGFFNLPMDEKKKFWQEEGDFEGFGQAFVFSEDQKLDWGDVFFILTQPQHMRKPRLFPKLPLPFRKTIESYSLETNKLSMTLLELMEKALKIETGVMTELFEGGIQRMRMTYYPPCPQPKHVIGLTPHSDPDALTILLQLNEVDGLQIRKEKIWVPIKPLSNAFVVNIGDILEIMSNGIYRSVEHRATVNSTKERLSVATFHSPRKDTEIGPILITPETPALFRTSGFEDYFRKFFAHKLNGKSFLSSIRIGETDEGNNAT

SEQ ID NO: 105 - protein, 379 aa, Papaver bracteatum
MEAPKLIMLGGSLFVPSVQELAKQSLAEVPVRYVRDDQDTLGNNINITPMSMIDQSIPVIDLEKLLSPEPIVGELELERLHSACKEWGFFQVVNHGVDSLLVEKVKSEIEGFFKLPMDEKTKFWQEEGDIEGFGQVFVHSQDQKLDWGDMFLMQTLPRHTRKPRLFPNLPLPLRQTIESYSSELSKLVLTLVDLMGKALQMESGVLTELFENGIQRMRMNYYPPCPQPEQVIGLTPHSDVGGLTILLQLNEVDGLQIKKDKVWVPIKPLANAFVVNVGDALEIMSNGIYRSVEHRATINSTKERLSIATFHNPRADREIGPIPSMISPETPALFKTTGYEEYFKKFFSRKLEGKSFLDSLRIREGDEHCGRLDVKGPCN

SEQ ID NO: 106 - protein, 365 aa, Papaver bracteatum
MEIPNPIKIGSSLLVPSVQELAKQSFAEVPARYIRNDVDPLITKLSDVSLIDQTVPVIDLQKLLSPEPIVGELELERLHSACKEWGFFQVVNHGVDNLLVEKVKSEIQGFFNLPMEEKKKFWQEEGDFEGFGQMFVQSEEQKLDWGDMFFILTQPQHMRKPRLFSKLPLPLRETIESYSLELIKLGLTIIKLMEKALQIDAGVMAELFEDGIHTMRMNYYPPCPQPEHVIGLTPHSDGGGLTILLQLNEVDGLQIRRENIWVPIKPLPNAFVVNIGDILEILSNGIYRSVEHRSTVNATKERLSVATFQNPKQESVIGPNMITPERPALFRKIVYKDYMKKLFSRKLDGKSFLDSLRIGEGDERP

SEQ ID NO: 107 - protein, 349 aa, Papaver bracteatum
METLKTVKPGGSLFIPNGQELAKQSLEEVYVGNDQDTMLLIGQTIPVIDLQKLLSPEPITGDMELDKLHSACKEWGFFQVVNHGVDILLVEKVKSEVHDFFNIPMDEKKPFWQEEGDLEGFGQVFITSEDQQLDWGDMFFMVTLPKHMRKPRLFLKLPLPLRETIESYSLKLSKLGVTLVELMGKALQMEDRIMSELFDDGRQTMRMNYYPPCPQPEQVIGLTPHSDPGGLTILLELNEVNGLIRKENIWVPIIPLPNAFIVNIGDILEIMSNGIYHSVEHRATINSTKERLSVAMFNSPKVDTEIGPIHSMITPETPALFRTIGYDEYLKIFFSRKLDGKSLLESMKI

SEQ ID NO: 108 - protein, 379 aa, Papaver bracteatum
  MOD_RES (373)..(373): Any amino acid
  MOD_RES (377)..(377): Any amino acid
MEAPKLIMLGGSLFVPSVQELAKQSLAEVPVRYVRDDQDTLGNNINITPMSMIDQSIPVIDLEKLLSPEPIVGELELERLHSACKEWGFFQVVNHGVDSLLVEKVKSEIEGFFELPVDEKKKFWQEEGDIEGFGQIFVHSEDQKLDWADMFYMLTLPPNMRKPRLFPNLPLPLRQTIDSYSSELSKLVLTLVDLMGKALQMESGVLTELFENGIQRMRMNYYPPCPQPEQVIGLTPHSDVGGLTILLQLNEVDGLQIKKDKIWVPIKPLRNAFVVNVGDALEIMSNGIYRSVEHRATINSTKERLSIATFHNPRADREIGPIPSMISPETPALFKTTGYEEYFKKFFSRKLEGKSFLDSLRIGEGDEHCGRLXVKGXCN

SEQ ID NO: 109 - protein, 362 aa, Papaver bracteatum
METPKLMKLGGSLFVPSVQELAKQSLAEVPARYVRDDRDMVGNIINVTPMSMIDQSIPVIDLEKLLSPDLIVGELELERLHSACKEWGFFQVVNHGVDSLLVEKVKSEIEGFFELPMDEKKKFWQEEGDAEGFAQFFVQSEDQKLDYSGDMFFMLNLPQHMRKPRLFLKLPLPLRETIESYSLKLSKLGVTLVELMGKALQMEDRIMSELFDDGRQTMRMNYYPPCPQPEQVIGLTPHSDPGGLTILLELNEVNGLIRKENIWVPIIPLPNAFIVNIGDILEIMSNGIYHSVEHRATINSTKERLSVAMFNSPKVDTEIGPIHSMITPETPALFRTIGYDEYLKIFFSRKLDGKSLLESMKI

SEQ ID NO: 110 - protein, 365 aa, Papaver bracteatum
METPKLRDFGSFLPVPSVQELAKQVLTEIPPRYIRTDLEALNKLSCASNTDQTVPIIDMQCLLSAEPEMELEKLHSACKEWGFFRVVNHGVDNLESVKSEIESFLNLPVNAKNKYGQKQGDDQGFGSRFVLSEEQKLDWGDFFYMVTRPLYLRKPHLFPELPLPLRETIESYSSEVSKLAMALFEMMGKALKIETGVMTEIFEGGMQAMRMNYYPPCPRPDLVIGLNAHSDFGGLTILLQLNEVEGLEIRNKGEWVSVKPLANAFVVNVGDVMEILTNGIYHSVEHRATINSSKERLSVATFHYPKLETGIGPLPCMITPKTPALFGRIERYELLLRKYYARKLNGKSTLDCMRIGNGFEDDNTA

SEQ ID NO: 111 - protein, 370 aa, Papaver bracteatum
MEAPKLIMLGGSLFVPSVQELAKQSLAEVPARYVRDDQDTLGNNINITPMSMIDQSIPVIDLEKLLSPEPIVGELELERLHSACKEWGFFQVVNHGVDSLLVEKVKSEIEGFFELPVDEKKKFWQEEGDIEGFGQIFVHSEDQKLDWADMFYMLTLPPNMRKPRLFPNLPLPLRQTIDSYSSELSKLVLTLVDLMGKALQMESGVLTELFENGIQRMRMNYYPPCPQPEQVIGLTPHSEVGGLTILLQLNEVDGLQIRKEKIWVPIKPLSNAFIVNIGDILEIMSNGIYRSVEHRATVNSTKERLSVATFHSPRKDTEIGPILITPETPALFRTSGFEDYFRKFFAHKLNGKSFLSSIRIGETDEGNNAT

SEQ ID NO: 112 - protein, 313 aa, Papaver bracteatum
MSMIDQSIPVIDLEKLLSPEPIVGELELERLHSACKEWGFFQVVNHGVDSLLVEKVKSEIEGFFELPVDEKKKFWQEEGDIEGFGQIFVHSEDQKLDWADMFYMLTLPPNMRKPRLFPNLPLPLRQTIDSYSSELSKLVLTLVDLMGKALQMESGVLTELFENGIQRMRMNYYPPCPQPEQVIGLTPHSDVGGLTILLQLNEVDGLQIRKEKIWVPIKPLSNAFIVNIGDILEIMSNGIYHSVEHRATINSTKERLSVAMFNSPKVDTEIGPIHSMITPETPALFRTIGYDEYLKIFFSRKLDGKSLLESMKI

SEQ ID NO: 113 - protein, 365 aa, Papaver bracteatum
METPKLVKSSGSSLFLSTSVQELAKQSLPEVPARYIRTNLEPLSNVSGDSQSVPVIDLQKLLSSEPIIGELELDKLHSACKEWGFFQVVNHGVDNLVMEKIKTEIQGFFNLSLDEKQKFWKKEGDAEGFGQNFIESEDQKLDWGDTFGMFTLPIHMRNPRLFPELPLPLRETIESYSLDVRKLALALIGLMEKALKIKTSAMSELFEDGGQAMRMNYYPPCPQPEHVIGLTPHSDAGGLTILLQLNEVDGLQIKKDKIWVPIKPLPNAFVVNIGDILEIMTNGIYRSVEHRATINSSKERLSVAAFHSPKGDTLIGPMVSLITPETPALFRTIGYQDYMKKFMSRKLDGKSLVNSMRIGEGDEDK

SEQ ID NO: 114 - protein, 356 aa, Papaver bracteatum
METPTLMKLGNGLSVPSVQELAKATLAEIPSRYICTDENLLTMGASTTDNETVPVIDLQNLLSPEPVIGMLELDRLHSACKEWGFFQLVNHGVDALLVDNEVQGFFNLPMDEKTKYGQKDGDDEGFGQFFVISEDQKLDWADVFYMSTLPLHSRKPHLFPELPLPLRETMESYSSEMKKLSMVLFDMMGKALQVVEIKGITELFEDGAQQIRMNYYPPCPQPELVFGLTSHSDFDGLTILLQLGEVEGLQIKKEERWISIKPLPDAFIVNVGDILEIMTNGIYRSVDHRAVVNSIKERLTIATFHDPRLEAEIGPISSLITPETPALFKRGVFEDLLKEMFLRKLDGKSFLDCMRM

SEQ ID NO: 115 - protein, 350 aa, Papaver rhoeas
GNGLSVPSVQELAKQTLAEIPSRYICTDENPLITGASVVDDETVPVINLQNLLSPEPVIGKLELDKLHSACKEWGFFQVVNHGVNDSLVDSVKSEIEGFFNLPANEKLKYGQKDGDVEGFGQHFVVSEDQKLDWADVFYMVTLPVRLRKPHLFPELPLPLRDTLDSYSSELNKLSMVLLEMMEKALKLVECKGITDFFEDGFQQMRMNYYPPCPRPELVTGLTSHSDFGGLTILLQLNDVEGLQIKKEERWISIKPLPNAFIVNIGDVLEIMSNGIYRSVDHRAVINSTKVRMSVATFHDPRLEAVIGPISSLITPETPALFKRGVFEDLLKEMFLRKLDGKSFLDCMRI

SEQ ID NO: 116 - protein, 351 aa, Papaver setigerum
LMKLANGMSVPIVQELAKLTVGEIPSRYICTDGNLLTMGASVIDYETVPVIDLQNLQSREPVIEKLELDRLHSACKEWGFFQLLNHGVDASLMDNVRSEIRGFFNLPISDKMKYGQKDGDEEGFGQHFIVSEDQKLDWVDAFMMFTLPLHSRNPRLTPEFPQPLRETVESYSSEMKKLSVLLFELMEKALQVKGITEMFEDGLQSIRMNYYPPCPRPELAIGLTSHSDFDGLTILLQLNEVEGLQIKKEERWISIKPLPNAFIVNVGDVLEVMTNGIYRSVDHRAVVNSTKERLSIATFHDPELESEIGPIASLITPETPALFKRGRFKDLLKENLSTKLDGKSFLDCIRM

SEQ ID NO: 117 - protein, 497 aa, Homo sapiens
MGLEALVPLAVIVAIFLLLVDLMHRRQRWAARYSPGPLPLPGLGNLLHVDFQNTPYCFDQLRRRFGDVFSLQLAWTPVVVLNGLAAVREALVTHGEDTADRPPVPITQILGFGPRSQGVFLARYGPAWREQRRFSVSTLRNLGLGKKSLEQWVTEEAACLCAAFANHSGRPFRPNGLLDKAVSNVIASLTCGRRFEYDDPRFLRLLDLAQEGLKEESGFLREVLNAVPVLLHIPALAGKVLRFQKAFLTQLDELLTEHRMTWDPAQPPRDLTEAFLAEMEKAKGNPESSFNDENLRIVVADLFSAGMVTTSTTLAWGLLLMILHPDVQRRVQQEIDDVIGQVRRPEMGDQAHMPYTTAVIHEVQRFGDIVPLGVTHMTSRDIEVQGFRIPKGTTLITNLSSVLKDEAVWEKPFRFHPEHFLDAQGHFVKPEAFLPFSAGRRACLGEPLARMELFLFFTSLLQHFSFSVPTGQPRPSHHGVFAFLVTPSPYELCAVPR

SEQ ID NO: 118 - protein, 1049 aa, Bacillus megaterium
MTIKEMPQPKTFGELKNLPLLNTDKPVQALMKIADELGEIFKFEAPGRVTRYLSSQRLIKEACDESRFDKNLSQAAKFARDFAGDGLVTSWTHEKNWKKAHNILLPSFSQQAMKGYHAMMVDIAVQLVQKWERLNADEHIEVSEDMTRLTLDTIGLCGFNYRFNSFYRDQPHPFIISMVRAADEVMNKLQRANPDDPAYDENKRQFQEDIKVMNDLVDKIIADRKARGEQSDDLLTQMLNGKDPETGEPLDDGNIRYQIITFLIAGHETTSGLLSFALYFLVKNPHVLQKVAEEAARVLVDPVPSYKQVKQLKYVGMVLNEALRLWPTAPAFSLYAKEDTVLGGEYPLEKGDEVMVLIPQLHRDKTVWGDDVEEFRPERFENPSAIPQHAFKPFGNGQRACIGQQFALHEATLVLGMMLKHFDFEDHTNYELDIKETLTLKPKGFVVKAKSKKIPLGGIPSPSTEQSAKKVRKKAENAHNTPLLVLYGSNMGTAEGTARDLADIAMSKGFAPQVATLDSHAGNLPREGAVLIVTASYNGHPPDNAKQFVDWLDQASADEVKGVRYSVFGCGDKNWATTYQKVPAFIDETLAAKGAENIADRGEADASDDFEGTYEEWREHMWSDVAAYFNLDIENSEDNKSTLSLQFVDSAADMPLAKMHGAFSTNVVASKELQQPGSARSTRHLEIELPKEASYQEGDHLGVIPRNYEGIVNRVTARFGLDASQQIRLEAEEEKLAHLPLAKTVSVEELLQYVELQDPVTRTQLRAMAAKTVCPPHKVELEALLEKQAYKEQVLAKRLTMLELLEKYPACEMKFSEFIALLPSIRPRYYSISSSPRVDEKQASITVSVVSGEAWSGYGEYKGIASNYLAELQEGDTITCFISTPQSEFTLPKDPETPLIMVGPGTGVAPFRGFVQARKQLKEQGQSLGEAHLYFGCRSPHEDYLYQEELENAQSEGIITLHTAFSRMPNQPKTYVQHVMEQDGKKLIELLDQGAHFYICGDGSQMAPAVEATLMKSYADVHQVSEADARLWLQQLEEKGRYAKDVWAG

SEQ ID NO: 119 - protein, 503 aa, Homo sapiens
MALIPDLAMETWLLLAVSLVLLYLYGTHSHGLFKKLGIPGPTPLPFLGNILSYHKGFCMFDMECHKKYGKVWGFYDGQQPVLAITDPDMIKTVLVKECYSVFTNRRPFGPVGFMKSAISIAEDEEWKRLRSLLSPTFTSGKLKEMVPIIAQYGDVLVRNLRREAETGKPVTLKDVFGAYSMDVITSTSFGVNIDSLNNPQDPFVENTKKLLRFDFLDPFFLSITVFPFLIPILEVLNICVFPREVTNFLRKSVKRMKESRLEDTQKHRVDFLQLMIDSQNSKETESHKALSDLELVAQSIIFIFAGYETTSSVLSFIMYELATHPDVQQKLQEEIDAVLPNKAPPTYDTVLQMEYLDMVVNETLRLFPIAMRLERVCKKDVEINGMFIPKGVVVMIPSYALHRDPKYWTEPEKFLPERFSKKNKDNIDPYIYTPFGSGPRNCIGMRFALMNMKLALIRVLQNFSFKPCKETQIPLKLSLGGLLQPEKPVVLKVESRDGTVSGA

SEQ ID NO: 120 - protein, 502 aa, Homo sapiens
MALIPDLAMETWLLLAVSLVLLYLYGTHSHGLFKKLGIPGPTPLPFLGNILSYHKGFCMFDMECHKKYGKVWGFYDGQQPVLAITDPDMIKTVLVKECYSVFTNRRPFGPVGFMKSAISIAEDEEWKRLRSLLSPTFTSGKLKEMVPIIAQYGDVLVRNLRREAETGKPVTLKDVFGAYSMDVITSTSFGVNIDSLNNPQDPFVENTKKLLRFDFLDPFFLSIIFPFLIPILEVLNICVFPREVTNFLRKSVKRMKESRLEDTQKHRVDFLQLMIDSQNSKETESHKALSDLELVAQSIIFIFAGYETTSSVLSFIMYELATHPDVQQKLQEEIDAVLPNKAPPTYDTVLQMEYLDMVVNETLRLFPIAMRLERVCKKDVEINGMFIPKGVVVMIPSYALHRDPKYWTEPEKFLPERFSKKNKDNIDPYIYTPFGSGPRNCIGMRFALMNMKLALIRVLQNFSFKPCKETQIPLKLSLGGLLQPEKPVVLKVESRDGTVSGA

SEQ ID NO: 121 - protein, 534 aa, Menispermum canadense
MIMMFIDYYSSWLPQTLLLQSILLAVSLVIFINLFLTRRRSYSSKSHTNIIHPPKAAGALPVIGHLYTLFRGLSAGVPLYRQLDAMADRYGPAFIIHLGVYPTLVVTCRELAKECFTTNDQTFATRPSTCAGKYIGYNYAFFGFAPYGPYWREARKIATVELLSNYRLDSLRHVREAEVGRNVDELYALHASSSTNKQNMMKIDMKQWFDQVTLNVILMMVVGKRCVTTGGNEEEVRVVKVLHEFFKHLGTLSVSDVVPYVEWMDLDGNIGRMKSTAKELDCILGRWLEEHRRERRSDFMDAMLAMVEGIKIPYYDSDTVIKAICLNLLNAGSDTLGITMTWALSLLLNNRHVLKKVKDELDVHVGKNRQVEELDVKNLVYLHAVVKETLRLFPPAPLGVPHEAMEDCVVGGFHVAKGTRLVVNVWKLHRDPSVWSDPLAFKPERFLDNNTVDVRGQHFQLLPFGSGRRGCPGITFALQVAHLTLARLLHGFEWDTPDGAPVDMSEVSVLTTAKKNPVEVLFTPRLPAEVYTQN

SEQ ID NO: 122 - protein, 527 aa, Nigella sativa
MLSIHDSTMVFLQLQAICGIFGFIFIITWWTRWKSSNKMKAPEVAGAWPVIGHLHLLGGGRPLYQLLGDMSDKYGPAFTLRMGIQKALVVSSWEVAKECLTTNDRALATRPSSAGGKYMGYNNALIPFSPYGPYWRDMRKIATLELLSNHRLEELKHVREMEINTCISDMYKLCQVEDGVEIKPISVDLSQWFADLTFNVVVMMITGKRYIGSTDAGDMNEIRHFQAALVKFMRLLRISLLVDVFPVLQWINYGGFKGVMKSTARDIDSVLENWLQEHQRKRLSPDFNGNHDFIDVMISTLEGTEFSDYDHNTIIKAISMAMVVGGTDTTTTTLIWAISLLLNNPNAMKKVQEELEIHVGKERNVDGSDIQHLVYLQAVVKETLRLYPPVPLSVMHQAMEDCVIGSYNIQAGTRVLFNLWKLHRDSSVWSDPLEFRPERFLTSHVDVDVRGQHFELIPFGSGRRSCPGISFALQVIHLTIARLFHGFNLTTPGNSSVDMSEISGATLSKVTPLEVLVTPRLSSKLYN

SEQ ID NO: 123 - protein, 525 aa, Hydrastis canadensis
MDSLLQLQIIGALAALIFTYKLLKVICRSPMTDGMEAPEPPGAWPIIGHLHLLGGQDPIARTLGVMTDKYGPILKLRLGVHTGLVVSNWELAKECFTTNDRVLASRPMGAAGKYLGYNYAIFGLAPHGPYWSEVRKIVLRELLSNQSLEKLKHVRISEINTCLKNLFSLNNGNTPIKVDMKQWFERPMFNVVTMMIAGKRYFSMENDNEAMNFRKVATEFMYLTGVFVVSDALPYLEWLDLQGHVSAMKRTAKELDIHVGKWLEEHRRAKLLGETKNEDDFVDVLLTILPEDLKDNQTYIHDRDTIIKATALALFLAASDTTAITLTWALSLILNNPDVLKRAQDELDKHVGKEKLVKESDIINLVYLQAIIKETLRLYPAAPLLLPHEAMEDCTVGGYHVPKGTRIFVNIWKLQRDPRVWFDPNEFRPERFLTTHANVDFKGQHFEYIPFSSGRRVCPGITFSTQIMHLTLAHLLHEFNIVTPTKSNAGVDMTESLGITMPKATPLEVLLTPRLPSNLYNQYRD

SEQ ID NO: 124 - protein, 550 aa, Eschscholzia californica
MNLLIFFQFLLQFQVLVGLSVLLAFSYYLWVSKNPKINKFKGKGALLAPQAAGAWPIVGHLPQLVGPKPLFRILGAMADNYGPIFMLRFGVHPTVVVSSWEMTKECFTTNDRHLASRPSNAASQYLIYEVYALFGFSLYGSSYWRDARKIATLELLSHRRLELLKHVPYTEIDTCIKQLHRLWTKNNKNQNNPELKVEMNQFFTDLTMNVILKLVVGKRFFNVDDAADHEKEEARKIQGTIFEFFKLTEGSVSAGALPLLNWLDLNGQKRAMKRTAKKMDSIAEKLLDEHRQKRLSKEGVKGTHDHNDFMDVLLSILDADQGDYSHHPFNYSRDHVIKATTLSMILSSMSISVSLSWALSLLLNNRHVLKKAQDELDMNVGKDRQVEEGDIKNLVYLQAIVKETFRMYPANPLLLPHEAIEDCKIGGFNVPAGTRVVVNAWKLQHDPRVWSNPSEFKPERFLNDQAAKVVDVRGQNFEYLPFGSGRRVCPGISFSLQTIHMSLARLVQAFELGTPSNERIDMTEGSGLTMPKTTPLHVLLNPRLPLPLYE

SEQ ID NO: 125 - protein, 537 aa, Glaucium flavum
MELINSLEIQPITISILALLTVSILLYKIIWNHGSRKNNKSNKNNRKTSSSAGVVEIPGAWPIIGHLHLFNGSEQMFHKLGSLADQYGPAPFFIRFGSRKYVVVSNWELVKTCFTAQSQIFVSRPPMLAMNILFFPKDSLSYIQHGDHWRELRKISSTKLLSSHRVETQKHLIASEVDYCFKQLYKLSNNGEFTLVRLNTWCEDMALNVHVRMIAGMKNYVAAPGSGEYGGQARRYRKALEEALDLLNQFTITDVVPWLGWLDHFRDVVGRMKRCGAELDSIFATWVEEHRVKRASGKGGDVEPDFIDLCWESMEQLPGNDPATVIKLMCKEHIFNGSGTSSLTLAWILSLIMNNPYVIKKAREELEKHVGNHRQVEESDLPNLLYIQAIIKEGMRLYTPGPFIDRNTTEDYEINGVHIPAGTCLYVNLWKIHRDPNVYEDPLEFKPERFLKNNSDLDLKGQNYQLLPFGAGRRICPGVSLALPLMYLTVSRLIHGFDMKLPKGVEKADMTAHGGVINQRAYPLEVLLKPRLTFQQA

SEQ ID NO: 126 - protein, 568 aa, Stylophorum diphyllum
MTIGALALLSFIYFLRVSVIKRTKYTNTAVTATNKLENDEDEANHSKRVVAPPEVAGAWPILGHLPQLVGLKQPLFRVLGDMADKYGPIFIVRFGMYPTLVVSSWEMAKECFTTNDRVLASRPASASGKYLTYNYAMFGFTNGPYWREIRKISMLELLSHRRVELLKHVPSTEIDSSIKQLYHLWVENQNQNKQGDHQVKVDMSQLLRDLTLNIVLKLVVGKRLFNNNDMDHEQDEAARKLQKTMVELIKVAGASVASDALPFLGWLDVDGLKRTMKRIAKEIDVIAERWLQEHRQKKLTSNDKGGSNNIQGGGGDNDFMDVMLSILDDDSNFFINYNRDTVIKATSLTMILAGSDTTTLSLTWALTLLATNPGALRKAQDELDTKVGRDRQVDERDIKNLVYLQAIVKETLRMYPAAPLAIPHEATQDCIVGGYHVTAGTRVWVNLWKLQRDPHAWPNPSEFRPERFLAVENDCKQQGTCDGEAANMDFRGQHFEYMPFGSGRRMCPGINFAIQIIHMTLARLLHSFELRVPEEEVIDMAEDSGLTISKVTPLELLLTPRLPLPLYI

SEQ ID NO: 127 - protein, 561 aa, Stylophorum diphyllum
FCQFQGIVGILLAFLTFLYYLWRASITGLRTKPKHNDFKVTKAAPEADGAWPIVGHFAQFIGPRPLFRILGDMADKYGSIFMVRFGMYPTLVVSSWEMAKECFTTNDRFLASRPASAAGKYLTYDFAMLSFSFYGPYWREIRKISMLELLSHRRVELLKHVPSTEIDSSIKQLYHLWVENQNQNKQGDHQVKVDMSQLLRDLTLNIVLKLVVGKRLFNNNDMDHEQDEAARKLQKTMVELIKVAGASVASDALPFLGWLDVDGLKRTMKRIAKEIDVIAERWLQEHRQKKLTSNDKGGSNNIQGGGGDNDFMDVMLSILDDDSNFFINYNRDTVIKATSLTMILAGSDTTTLSLTWALTLLATYPLCALRKAQDELDTKVGRDRQVDERDIKNLVYLQAIVKETLRMYPAAPLAIPHEATQDCIVGGYHVTAGTRVWVNLWKLQRDPHAWPNPSEFRPERFLAVENDCKQQGTCDGEAANMDFRGQHFEYMPFGSGRRMCPGINFAIQIIHMTLARLLHSFELRVPEEEVIDMAEDSGLTISKVTPLELLLTPRLPLPLYI

SEQ ID NO: 128 - protein, 561 aa, Chelidonium majus
MDLFIFFSRFQYIVGLLAFLTFFYYLWRVSITGTRIKTNQNIMNGTNMMAPEAAGAWPIVGHLPQLVGPQPLFKILGDMADKYGSIFMVRFGMHPTLVVSSWEMAKECFTTNDKFLASRPTSAGGKYLTYDFAMFGFSFYGPYWREIRKISTLELLSHRRVELLKHVPYTEIGGSIKQLYKLWMETQNQNKQRDDHQVKVDMSQVFGYLTLNTVLKLVVGKGLFNNNDMNHEQEEGRKLHETVLEFFKLAGVSVASDALPFLGWLDVDGQKRSMKRIAKEMDLIAERWLQEHRQKRLTSNNKASSGHDDFMSVLLSILDDDSNFFNYNRDTVIKATSLNLILAASDTTSVSLTWVLSLLVTNPGALKKVQDELDTKVGRNRHVEERDIEKLVYLQATVKETLRMYPAGPLSVPHEATQDCTVGGYQVTAGTRLVVNVWKLQRDPRVWPNPSEFKPERFLPDGCEVGCGEAANMDFRGQHFEYIPFGSGRRMCPGIDFAIQIIHMTLACLLHAFEFQVPSSLDKHLVPAVIDMSEGSGLTMPKVTPLEVLLNPRLPLPLYEL

SEQ ID NO: 129 - protein, 561 aa, Eschscholzia californica
MEKPILLQLQPGILGLLALMCFLYYVIKVSLSTRNCNQLVRHPPEAAGSWPIVGHLPQLVGSGKPLFRVLGDMADKFGPIFMVRFGVHPTLVVSSWEMAKECFTSNDKFLASRPPSAASIYMAYDHAMLGFSSYGPYWREIRKISTLHLLSHRRLELLKHVPHLEIHNFIKGLYGIWKDHQKQQQQPTARDDQDSVMLEMSQLFGYLTLNIVLSLVVGKRVCNYHADGHLDDGEEAGQGQKLHQTITDFFKLSGVSVASDALPFLGLFDLDGQKKIMKRVAKEMDFVAERWLQDKKSSLLLSSKSNNKQNEAGEGDVDDFMDVLMSTLPDDDDSFFTKYSRDTVIKANSLSMVVAGSDTTSVSLTWALSLLLNNIQVLRKAQDELDTKVGRDRHVEEKDIDNLVYLQAIVKETLRMYPAGPLSVPHEAIEDCNVGGYHIKTGTRLLVNIWKLQRDPRVWSNPSEFRPERFLDNQSNGTLLDFRGQHFEYIPFGSGRRMCPGVNLATPILHMTLARLLQSFDLTTPSSSPVDMTEGSGLTMPKVTPLKVLLTPRLPLPLYDY

SEQ ID NO: 130 - protein, 567 aa, Papaver bracteatum
MDVAIIVDHHYLQPFVSIAGLLALLSFFYCIWVFIIRPRIIKSNLDERKLSPSSPPEVAGAWPIVGHLPQLIGSTPLFKILADMSNKYGPIFMVRFGMYPTLVVSSWEMSKECFTTNDRLFATRPPSAAGKYLTKALFAFSVYGPYWREIRKISTIHLLSLRRLELLKHGRYLEIDKCMKRLFEYWMEHHKNIISTTSSVKVNMSQVFAELSLNVVLKIIVGKTLFIKNGNEDYTKEEEEGQKLHKTILKFMELAGVSVASDVLPFLGWLDVDGQKKQMKRVYKEMNLIASKWLGEHRERKRLQIIQKRGAARGSNYDDGNDFMDVLMSILDEENDDLFFGYSRDTVIKSTCLQLIVAASDTTSLAMTWALSLLLTNPNVLQKAQDELDTKVGRDRIIEEHDIECLVYLQAIVKETLRLYPPAPLSLPHEAMEDCTVGGYQVKAGTRLVVNLWKLQRDPRVWSNPLEFKPERFLPQSDGGFGGEEARMDFRGQHFEYTPFGSGRRICPGIDFFLQTVHMALARLLQAFDFNTAGGLVIDMVEGPGLTMPKVTPLEVHLNPRLPVTLY

SEQ ID NO: 131 - protein, 558 aa, Papaver bracteatum
MQVDWPNILQKYYPIITCSLLTLLSFYYIWVSITKPSRNSKTKLPPPEVAGSWPIVGHLPQLVGSTPLFKILANMSDKYGPIFMVRFGMHPTLVVSSWEMSKECFTTNDKFLASRPPSASAKYLGYDNAMFVFSDYGPYWREIRKISTLQLLTHKRLDSLKNIPYLEINSCVKTLYTRWAKTQSQIKQNVGGAADDFVKVDMTEMFGHLNLNVVLRLVVGKPIFIQKDNADEDYTKDGHNKEELGQKLHKTIIEFFELAGASVASDVLPYLGWLDVDGQKKRMKKIAMEMDLFAQKWLEEHRQKGINHDNENDFMAVLISVLGEGKDDHIFGYSRDTVIKATCLTLIVAATDTTLVSLTWALSLLLTNPRVLSKAQDELDTVVGKERNVEDRDVNHLVYLQAVIKETLRLYPPSPLAVPHEAIENCNVGGYEVKARTRLLVNLWKIHRDPRVWSNPLEFKPERFLPKLDGGTGEASKLDFKGQDFVYTPFGSGRRMCPGINFASQTLHMTLARLLHAFDFDIESNGLVIDMTEGSGLTMPKVTPLQVHLRPRLPATLY

SEQ ID NO: 132 - protein, 534 aa, Menispermum canadense; identical to SEQ ID NO: 121

SEQ ID NO: 133 - protein, 527 aa, Nigella sativa; identical to SEQ ID NO: 122

SEQ ID NO: 134 - protein, 525 aa, Hydrastis canadensis; identical to SEQ ID NO: 123

SEQ ID NO: 135 - protein, 550 aa, Eschscholzia californica; identical to SEQ ID NO: 124

SEQ ID NO: 136 - protein, 537 aa, Glaucium flavum; identical to SEQ ID NO: 125

SEQ ID NO: 137 - protein, 568 aa, Stylophorum diphyllum; identical to SEQ ID NO: 126

SEQ ID NO: 138 - protein, 561 aa, Stylophorum diphyllum; identical to SEQ ID NO: 127

SEQ ID NO: 139 - protein, 561 aa, Chelidonium majus; identical to SEQ ID NO: 128

SEQ ID NO: 140 - protein, 561 aa, Eschscholzia californica; identical to SEQ ID NO: 129

SEQ ID NO: 141 - protein, 567 aa, Papaver bracteatum; identical to SEQ ID NO: 130

SEQ ID NO: 142 - protein, 558 aa, Papaver bracteatum; identical to SEQ ID NO: 131

SEQ ID NO: 143 - protein, 571 aa, Papaver bracteatum
MMDLAMFIDQYFSLAKIAGLLALLSFFYYLWISTLWSPRNPKLSSVSPPEVAGAWPILGHLPQLLGSRPLFKILADMSDNYGPIFMVRFGMHPTLVVSSWEMAKECFTTNDRFLAGRPSGAANKYLTFALFGFSTYGPYWREIRKIATLHLLSHRRLELLKHVPDLEVTNCMKHLHRRWIDSQNQIKQNDAAAGSVKVDMGRVFGELTLNVVLKLVAGKSIFFKNDNTRQYDSKDGHNKEEEEGKKLHKTIIDFYSLAGASVASDVLPFLGWLDVDGQKKRMKRVAKDMDFIAAKWLEEHRHQKRQTVLSSSATLGSSNHDDAKDFMDVLMSILDGENDDLFFGYSRDTVIKTTCLQLIAAAADTTSVTMTWALALLITNPTILRKAQDELDTKVGKDRNIEERDINDLVYLQAIVKETLRMYPAGPLNVPHEAIADCNIGGYEVRAGTRLLVNLWKMHRDPRVWSNPSEFKPERFLPQLDGGSGGEAANLDFRGQDFEYLPFSAGRRMCPGIDFSLQTLHMTLARLLHGFDFNNDSAGIIIDMEEGSGLTMPKLTPLEIYLCPRLPAKLY

SEQ ID NO: 144 - protein, 361 aa, Thalictrum flavum
MAVEGKQVAPKKAIIVELLKKLELGLVPDDEIKKLIRIQLGRRLQWGCKSTYEEQIAQLVNLTHSLRQMKIATEVETLDDQMYEVPIDFLKIMNGSNLKGSCCYFKNDSTTLDEAEIAMLELYCERAQIKDGHSVLDLGCGQGALTLYVAQKYKNSRVTAVTNSVSQKEFIEEESRKRNLSNVEVLLADITTHKMPDTYDRILVVELFEHMKNYELLLRKIKEWMAKDGLLFVEHICHKTFAYHYEPIDEDDWFTEYVFPAGTMIIPSASFFLYFQDDVSVVNHWTLSGKHFSRTNEEWLKRLDANVELIKPMFVTITGQCRQEAMKLINYWRGFCLSGMEMFGYNNGEEWMASHVLFKKK

SEQ ID NO: 145 - protein, 358 aa, Coptis japonica
MAVEAKQTKKAAIVELLKQLELGLVPYDDIKQLIRRELARRLQWGYKPTYEEQIAEIQNLTHSLRQMKIATEVETLDSQLYEIPIEFLKIMNGSNLKGSCCYFKEDSTTLDEAEIAMLDLYCERAQIQDGQSVLDLGCGQGALTLHVAQKYKNCRVTAVTNSVSQKEYIEEESRRRNLLNVEVKLADITTHEMAETYDRILVIELFEHMKNYELLLRKISEWISKDGLLFLEHICHKTFAYHYEPLDDDDWFTEYVFPAGTMIIPSASFFLYFQDDVSVVNHWTLSGKHFSRTNEEWLKRLDANLDVIKPMFETLMGNEEEAVKLINYWRGFCLSGMEMFGYNNGEEWMASHVLFKKK

SEQ ID NO: 146 - protein, 351 aa, Papaver somniferum
MQLKAKEELLRNMELGLIPDQEIRQLIRVELEKRLQWGYKETHEEQLSQLLDLVHSLKGMKMATEMENLDLKLYEAPMEFLKIQHGSNMKQSAGYYTDESTTLDEAEIAMLDLYMERAQIKDGQSVLDLGCGLGAVALFGANKFKKCQFTGVTSSVEQKDYIEGKCKELKLTNVKVLLADITTYETEERFDRIFAVELIEHMKNYQLLLKKISEWMKDDGLLFVEHVCHKTLAYHYEPVDAEDWYTNYIFPAGTLTLSSASMLLYFQDDVSVVNQWTLSGKHYSRSHEEWLKNMDKNIVEFKEIMRSITKTEKEAIKLLNFWRIFCMCGAELFGYKNGEEWMLTHLLFKKK

SEQ ID NO: 147 - protein, 358 aa, Papaver somniferum
MGSIDEVKKESAGETLGRLLKGEIKDEELKKLIKFQFEKRLQWGYKSSHQEQLSFNLDFIKSLKKMEMSGEIETMNKETYELPSEFLEAVFGKTVKQSMCYFTHESATIDEAEEAAHELYCERAQIKDGQTVLDIGCGQGGLVLYIAQKYKNCHVTGLTNSKAQVNYLLKQAEKLGLTNVDAILADVTQYESDKTYDRLLMIEAIEHMKNLQLFMKKLSTWMTKESLLFVDHVCHKTFAHFFEAVDEDDWYSGFIFPPGCATILAANSLLYFQDDVSVVDHWVVNGMHMARSVDIWRKALDKNMEAAKEILLPGLGGSHETVNGVVTHIRTFCMGGYEQFSMNNGDEWMVAQLLFKKK

SEQ ID NO: 148 - protein, 350 aa, Eschscholzia californica
MGSSAGEIMGRLMKGEIEDEELKKLIRHQWDRRIEWGYKPTHEKQLAFNLDFIKGLKEMVMSGEIDTMNKETYELPTAFLEAVFGKTVKQSCCYFKDENSTIDEAEEAAHELYCERAQIKDGQTVLDIGCGQGGLVLYIAEKYKNCHVTGLTNSKAQANYIEQQAEKLELTNVDVIFADVTKFDTDKTYDRILVVETIEHMKNIQLFMKKLSTWMTEDSLLFVDHISHKTFNHNFEALDEDDWYSGFIFPKGCVTILSSSTLLYFQDDVSALDHWVVNGMHMARSVEAWRKKLDETIEAAREILEPGLGSKEAVNQVITHIRTFCIGGYEQFSYNNGEEWMITQILFKKK

SEQ ID NO: 149 - protein, 363 aa, Papaver somniferum
MSTTMETTKISQQDDLWKNMELGQISDEEVRRLMKIGIEKRIKWGTKPTQQEQLAQLLDFNKSLRGMKMATEIDTLENHKIYETPESFNQIIGGKESAGLFTDETTTTMEEANTKMMDLYCERAGLKDGHTILDLGCGAGLLVLHLAKKYKKSKITGITNTSSHKEYILKQCKNLNLSNVEIILADVTKVDIESTFDRVFVIGLIEHMKNFELFLRKISKWMKDDGLLLLEHLCHKSFSDHWEPLSEDDWYAKNFFPSGTLVIPSATCLLYFQEDVTVIDHWILSGNNFARSNEVILKRIDGKIEEVKDIFMSFYGIGREEAVKLINWWRLLCITANELFKYNNGEEWLISQLLFKKKLMTCI

SEQ ID NO: 150 - protein, 356 aa, Thalictrum flavum
METKQTKKEAVANLIKRIEHGEVSDEEIRGMMKIQVQKRLKWGYKPTHEQQLAQLVTFAQSLKGMEMAEEVDTLDAELYEIPLPFLHIMCGKTLKFSPGYFKDESTTLDESEVYMMDLYCERAQIKDGQSILDLGCGHGSLTLHVAQKYRGCKVTGITNSVSQKEFIMDQCKKLDLSNVEIILEDVTKFETEITYDRIFAVALIEHMKNYELFLKKVSTWIAQYGLLFVEHHCHKVFAYQYEPLDEDDWYTEYIFPSGTLVMSSSSILLYFQEDVSVVNHWTLSGKHPSLGFKQWLKRLDDNIDEVKEIFESFYGSKEKAMKFITYWRVFCIAHSQMYSTNNGEEWMLSQVLFKKK

SEQ ID NO: 151 - protein, 358 aa, Papaver bracteatum
MGSIDEVKKESAGETLGRLLKGEIKDEELKKLIKFQFEKRLQWGYKSSHQEQLSFNLDFIKSLKKMEMSGEIETMNKETYELPSEFLEAVFGKTVKQSMCYFKHESATIDEAEEAAHELYCERAQIKDGQTVLDIGCGQGGLVLYIARKYKKCHVTGLTNSKAQVNYLLKQAEKLGLTNVDAILADVTQYESDKTYDRLLMIEAIEHMKNLQLFMKKLSTWMTEESLLFVDHVCHKTFAHFFEAVDEDDWYSGFIFPPGCATILAANSLLYFQDDVSVVDHWVVNGMHMARSVDIWRKALDKNMEAAKEILLPGLGGSHEAVNGVVTHIRTFCMGGYEQFSMNDGDEWMVAQLLFKKK

SEQ ID NO: 152 - protein, 358 aa, Papaver bracteatum
MGSIEEVKKESAEETLGRLLRGEINDEELKKLIKYQLEKRLQWGYKSSHQEQLSFNLDFINSLKKMGMSGQVEAFTNEVYELPTECFEAAYGKSMKLSGCYFKHESSTIDEAEEASHELYCERAQIKDGQTVLDIGCGQGGLVLYVAQKYKNCHVTGLTNSKEQVNYILKQAEKLGLRNVDVILADVTQYESDKTYDRILVIGVVEHMKNMQLFIKKLSTWMAEDSLLFVDHSCHKTFNHFFEALDEDDWYSGYIFPPGCATFLSADSLLYFQDDVSVVDHWVVNGMHFARTVDAWRKKLDKNMEAVKEILLPGLGGNHEAVNGVITHIRTCCVGGYVQFSLNDGDEWMNAQLLFKKK

SEQ ID NO: 153 - protein, 368 aa, Argemone mexicana
MCLFFAEKMGLMAEANNQQQLKKEDLLKNMELGLIPDEEIRKLIRVQLEKRLNWGYKSTHEQQLSQLLHLVHSLKKMKIATEMENLDLKLYEAPFSFVQIQHGSTIKESSGLFKDESTTLDEAEIAMLDLYTKRAKIEDGQSVLDLGCGLGAVTLYVAQKFKNCYVTGITSSVEQKDFIEGRCKELKLSNVKVILADITTYETEEKYNRIFAVELIEHMKNYELLLRKISEWMKQDGLLFIEHVCHKTLAYHYEPLDEEDWYTNYIFPAGTLTLSSATLLLYFQDDVAVVDQWTLSGKHYSRSHEEWLKRIDGNIEEVKEIMKSITKSEEEAKKLLNFWRIFCMCGAELFGYKNGEEWMMTHILFKKK

SEQ ID NO: 154 - protein, 364 aa, Glaucium flavum
MDLMATSKQVKKKEELLKNMELGLVPDEEIRRLIRIELEKRLKWGYKPTHQQQLAQLLDLVHSLKKMKIATEMESLDLKLYEAPFSFVQIKHGSTIKESSSYFKDESMTLDEAEIAMLDLYVERAQIEDGQSVLDLGCGLGAVTLHVAKKYKNCHVTGLTNSVEQKDFIEGKCKELNLSNVKVILADVTSHEMEDKFDRIFAVELIEHMKNYELLLRRISKWMKDDGLLFIEHVCHKTFAYHYEPIDEDDWYTEYIFPAGTLTLSSASLLLYFQDDVSVVNHWTLSGKHYSRSHEEWLKRIDGNMDAVKEIMKSITKTEEEAVKLINFWRIFCMCGAELFGYKDGEEWMMSHVLFKKKQLLQQC

SEQ ID NO: 155 - protein, 353 aa, Eschscholzia californica
MVDLKVEKEELLKSMELGLVPDEDIRKHIRSQLEKRLKWGYKPNHEQQLAQLLDVIHSLKKMKISKEYESFDLRLYEAPFDFHKIQLGTHLKESCSYYKDESTTLDEAEGAMLDLYTQKAKIEDGQSILDLGCGVGAVTLFVANKYKNCKVTGITSCQWQKDFIENKCKELNLTNVRVIIGDVTAYEMEETFDRIFAIELIEHMKNYELLLRKISKWMKDDGLLFIEHVCHKILAYPYEPIDEEDWFTEYIFPGGTLTLSSASLLLYFQDDVSVVEHSSLNGKHYSRSHGEWLKNIDANIDEVKGIMRSITKTEEEAVRLVNFWRIFCMCGIELFGYNNGEEWMVSHILLKKK

SEQ ID NO: 156 - protein, 359 aa, Eschscholzia californica
MAADLVVKKWNNKKELIDEMELGLVGDEEIRELIRNDLEKRLKWGYKSNHEQQLAQLLHFVHSLRGMKIAADEVESFNIKVYEAPFSFNKIQLGSSLKESSCYYKHDETTLDEGEIAMMELYTEKAQIKDGQSVLDLGCGLGSLTLYVANKYPNCKVTGTTASLWHKDFIESKCKEQELTNVKIVLGDATTHEMEERFDRILAIGLIEHLKNYGLLLGRISKWLKDDGFLFIQHVCHKTLAYPLVPVDEEDWIGEYIFPGGTLTMPSASLLLYFQDELSVVDHSTLNGKHFSRTHEEWLKNIDAKIDEVKEILKSVTKTEEEVVRLTNFWRIFCMFGVEMFGYNEGEEWMLSQILFKKK

SEQ ID NO: 157 - protein, 353 aa, Chelidonium majus
MASGKVVDLLKRLDSGLVSDEELRRVIRFELERRLKWGYKPTHEQQLAELLNLAHATKQMEIATKIDTLNSTMYEVPNSFLEIQLGSTLKESCLYFKDESTTVDEAEIAMMDLYLERAQIKDGQIILDLGCGLGALAFHIAQKYTNCNVTSVTNSVKQKEFIEEKCKILNVSNVKVILTDICTLEMEATFDRIFAIGLIEHMKNYELLLRKFSAWMKQDGLLFIEHLCHKTLGYHNEPIDEDDWYTAYFFPAGTLTFIPSSFLLYFQDDVSVVNHWTLSGKHFSRSNEEWLKRMDNKIDEVKEIYKAAASETKDDDIMKLIRLWRFLSISAAEMFGYKDGEEWMISQVLFKKK

SEQ ID NO: 158 - protein, 366 aa, Eschscholzia californica
MASLVEEGSFVNNKESVKERVSELVKRLKNGLVSDEELRKLMRVELEKRLEWGYKSTHEQQLSQLIDLAHSMKKMEIAMEIDALNSTVYEVPLSFLQIIHGTTIKESCLYFKDESTTVDEAEIAMMDLYLERAQIKDGQSILDLGCGLGGFSFHIASKFTGCNITAVTNSVKQKEFIEEKCKTLNVPNIKVILADICTTEIENVFDRIIAIGLIEHMKNYELLLKKFSKWMTQDGLLFIEHLCHKTFGYHNEPLDEDDWYTTYFFPAGTLTFIPSSFLLYFQDDVSVVDHWTLNGKHFARSNEEWLKRMDEKMDEVKQIFRSNLKSENEVTKTIGEWRFLSMSAAEMFGYNNGEEWMVSQLLFKKK

SEQ ID NO: 159 - protein, 362 aa, Glaucium flavum
MGSNETNGELKTKEMVPDLLKRLESGLVADEELRKLIRFELERRLKWGYKPTHEQQLAELLKLAHSTKQMKIATETDSLNSTMYEVPIPFLQLQFGSAIKESCCYFKDESTTLDEAEVAMMDLYLERTQIKDGQSILDLGCGLGALAFHIVQKYPNCNVLAITNSVEQKEFIEEKCKIRKVENVKVSLADICTLEMKTTFDRIFAIGLLEHMKNYQLLLKKFSNWMKQDGLLFIEHLCHKTLAYHYEPLDEDDWYTEYFFPAGTLTIISSSFLLYFQDDVSIVNHWSLSGKHFSRSNEEWLKRMDMKIDEVKEILEAAFENKDHDITKLINHWRFLAINATEMFGYNNGEEWMVSQVLFKKK

SEQ ID NO: 160 - protein, 365 aa, Sanguinaria canadensis
MASDHEVSNKELKKKKEVITELLKRLESGLVSDEELRGLIRFELERRLRWGYKPTHEQQLAQLLNLAHSMKQMKIATEIDALNSTMYEVPIPFLQIQLGSTLKESCCYFKDESTTVDEAEIAMMDLYLERAQIKDGQSILDLGCGLGALAFHIAQKYTNCNITAITNSVRQKEFIEEKCKILNVSNVKVSLADICTLEMEATFDRIFAIGLIEHMKNYELLLKKFSEWMKQDGLIFIEHLCHKTLAYHYEPLDEDDWYTEYFFPAGTLTLISSSFLLYFQDDVSVVDHWTLSGKHFSRSNEEWLKRMDEKIDEVKEIFESVSDSKDDDVTKLINHWRFFCISSAEMFGYNNGEEWMISQVLFKKK

SEQ ID NO: 161 - protein, 371 aa, Corydalis chelanthifolia
MIKKSKIMAFSDHHHEVVKNHSKKEMIADLLKRLEAGLVPDEEMRNLFRFELERRLQWGYKSIHQEQLSQLLKLAHSTKEMTIVAEMDALNSSMYELPISFLQIQLGSNLKQSSLYFKDELTTVDEAEVAIMDLYLERAQIEDGQSILDLGCGLGAFSFHVARKYTNCNITAVTNSLTQKEFIEKKSKILNIQNVKVIFADVTTVEMETTFDRVFAIGLIEHMQNYELFLKKLSKWMKQDGLLFIEHFCHKTLAYHYKPIDEDDWFTNLLYPNGTVISSSLLLYFQDDVSVVDHWSLSGKHFSRASEESLKRMDAKMDEMKEIFESITDSKEEAMKLINQWRIFCISCAEMFGYNNGEEWMTSHFLFKKKL

SEQ ID NO: 162 - protein, 373 aa, Corydalis chelanthifolia
MGSSTASDHEMVIMENDSKNKQVVIADLLKRLVGGLVPDEEMRNMFRFELEKRLKWGYKSTHQQQLSQLLNLVELNKGIAKIAPEMDALNSAMYEVPIPYLKLMLGSTLKQSCLYFKDESTTLDEAEIEMMDLYLERADIQDGQSILDLGCGLGGLGFHIAQKYISCNITALTNSLTQKEFIEEKCKTLNIPNVKVILADVTTVEIETTFDRLFAIGLVEHMENYELFLRKLSKWMKQDGLLFIEHLCHKTLAYHYKPIDEDDWYSNLLYPTGTLTSASFLLYFQDDLSVVDHWSLSGKHFSRATEEWLKMIDANMDKIREIYESVTESKEEATRSINQWRIFCISCAEMFGYNDGEEWMISHFLFKNKKQIE

SEQ ID NO: 163 - protein, 366 aa, Corydalis chelanthifolia
MATSDQEVKTSKMEMIADLLKRLEAGLVPDDEIRSLIRVELERRLKWGYKSTHQEQLDQLLNLAHSIKKMKIASTEMDGLTSTMYEVPISLVQIQLGSHLKESCLYFKDETTTVDEAEIAMMDLYLERAQIKDGQSILDLGCGLGAVSFHIAQKYTSCNITAVTNSVRQKEFIEEKSKTLNVPNVKVLLADITTLEMEHTFDRLFAISLIEHMENYELLLRKLSEWMKQDGLLFIEHLCHKTLSYHFEPMDEDDWYTNLLFPAGTLTLVSASFLLYFQDDLSVVNQWVMSGKHFSRANEEWLKNMDAKMDEMREIFESITDSEEEVVKLINHWRIFCISSAEMFAYNDGEEWMNSHVLFKKKKQIQ

SEQ ID NO: 164 - protein, 359 aa, Corydalis chelanthifolia
MAGSGANKEMIADLLKRLEVGLVPDEEIRSLIRFQLKRRLKWGYKTTHQEQLEQLLSLAHSIRKMKIATEMDALNSTMYEVPISFMQIVFGSTLKESCLYFKDEATTVNEAEIAMMDLYLERAQIKDGQSILDLGCGMGSLCFHIARKYTNCNITAVTNSVSQKEFIEEKSKTLNLPNVKVILADITTLEMDDTYDCLFAIGLIEHMKNYELLLRKLSNWMKQDSLLFIDHVCHKTLAYHYEPIDEDDWYTNLLFPAGTLTLVSASFLLYFQDDLSLVDHWSMSGKHFSRTNKEWLKNIDGKMDKIREIVKSITDSEEEVVKLINHWRMLCINSSEMFGFNDGEEWMNSHVLFKKKKQI

SEQ ID NO: 165 - protein, 353 aa, Sanguinaria canadensis
MEMIADLLKRLEAGLVPDDEIRSLIRVELERRLKWGYKSTHQEQLDQLLNLAHSIKKMKIASTEMDGLTSTMYEVPISLVQIQLGSHLKESCLYFKDETTTVDEAEIAMMDLYLERAQIKDGQSILDLGCGLGSVCFHIARKYTSCNITAVTNSVSQKEFIEEKSKTLNVPNVKVLLADITTLEMDDTFDCLFAIGLIEHMENYELLLRKLSDWMKQDGLLFIDHVCHKTLSYHFEPMDEDDWYTNLLFPAGTLTLVSASFLLYFQDDLSLVDHWSMSGKHFSRTNKEWLKNIDGKMDKIREIVKSITDSEEEVVKLINHWRMLCINSSEMFGFNDGEEWMNSHVLFKKKKQI

SEQ ID NO: 166 - protein, 363 aa, Papaver bracteatum
MCTTMDTTKISQQDDLWKNMELGLISDEEVRRLMKIETEKRIKWGTKPTQQEQLAQLLDFNKSLRGMKMATEVHALENHKIYEIPDSFNQIIGGKESAGLFTDEATTTIEEANTKMMDLYCERAGLKDGQTILDIGCGAGLLVLHLAKKYKNCKITGVTNTSWHKEHILEQCKNLNLSNVEVILADVTTVDIERTFDRVFVIGLIEHMKNFELFLRKISKWMKDDGLLFLEHLCHKSFSDHWEPLSEDDWYAKNFFPSGTLVIPSATCLLYFQEDVTVKDHWLLSGNNFARSNEAILKRIDSKIEEVKDIFMSFYGIGEEEAVKLINWWRLLCITANELFKYNNGEEWLISQLLFKKKLMTCI

SEQ ID NO: 167 - protein, 366 aa, Papaver bracteatum
MVKGDQFQTTTMEETKISQENDLWTNMELGLIPDEEVRRLMKIEIEKRIEWGMKPTQHQQLAQLLDFTKSLRGMKMATELDKLDSKLYETPHSFNQIVNGSTLKESSGLYTDVTTTMDEASIKMMDLYCERANIKDGQTILDLGCGPGPLVLHIAKKYSNCKITGVTNAFSQREYILEECKKLSLSNVEIILADVTSLDLETTFDRVFVIGFIEHMKNFELFLRKISKWMKDDAVLFLEHFCHKSFSYHGEPLSEDDWYAKNFFAPGTLVIPSATCLLYFQEDLAVIDHWFLSGNHFARTNEEMLKGIDGKIEEIKDIFMSFYGINEAEAVKLINWWRLFCITGAEMFSYNNGEEWFISQLLFKKK

SEQ ID NO: 168 - protein, 364 aa, Eschscholzia californica
MALEQEDSMSVPERNEGVADLIKRMELGLVNDEEIRRLMRIQIENRLKWGYKPTHDQQLAQHLHFINSLKEMKMATEMDSLDSQVYESPNSFQQIMCGRSMKESAGLFMDDVTTVEEAHIRMMDLYCDKATFEDGQKILDLGCGHGSVVLHVAQKYKGCQVTGVTNSSAQKQYILEQCKKLDLSNVEIILADVTTLEMEEKFDRVIIIGLIEHMKNFKLFFQKVSKWMKEGGLLFLENYFHKDFAYHCEKIDEDDWYDGYIFPPGSLLMPSASTLLYFQEDLTVADHWVLPGTHFAKTFEEFLKKIDLRIEEVREIFEAFYGISKEEAMKLSNYWRNFCISAMEIFNYNNGQEWMISHLLYTKK

SEQ ID NO: 169 - protein, 368 aa, Chelidonium majus
METGKNNQNMKTTIDDLWNQMMLGIVPDKEIRRLMKIELKKRLDWGYRPTHQQQLSQLLDFAKGLCNYCWTALRCMKMSAEFDTLDSKVYETPKSFQQIMCGTTIKESSGLFMNESTTLDQAQISMLDLYFDKAKIKDGQSILDLGCGHGALILYLAQKYQNCNITGVTNSLSQKEFIVEKCKKLGLSNVEILLADVTKLEMEDMFDRVFVIGLIEHMKNFELFLRKISEWMKPDGLLFLEHYCHKSFAHQWEPIDEEDWFSKYIFPPGTVIIPSASFLLYFQEDVKVIDHWTLSGNHFARTQEEWLKGIDGHIDEVEKTFESFYGISKEEAVKLINFWRVFCLSGVEMFGYNNGEEWMISHLLFKKK

SEQ ID NO: 170 - protein, 361 aa, Glaucium flavum
MTMEANNAKKEAIENLWEQMMMGLVPDHEITRLMKSELQKRLNWGYKPTHQQQISQLLDFAKSLRRMEMSLDFDNLELDTKMYETPESFQLIMSGTTLKESSGLFTDETATLDQTQIRMMDLYLEKAKIKDGQSILDLGCGHGALILHVAQKYRNCNVTGVTNSIAQKEFIFKQCKKLGLSNVEMVLADVTKCEMKATFDHIFVIGLIEHMKNFELFLRKVSEWMKSDGLLFMEHYCHKSFAYQWEPMDDDDLFSKYVFPPGSAIIPSASFLLYFQDDLTVVDHWTLSGNHFARTHQEWLKRIDSQSDEIKGIFESFYGISKEEAVKLINYWRVFCLFGVEMFGYNNGEEWMISHLLFKKK

SEQ ID NO: 171 - protein, 363 aa, Corydalis chelanthifolia
MEVVATSSARNPKKEIVDLWKRMELGLIPDEEIRDLMKIGLEKRLKWGYKPTHEQQLSQLLHFAKSLRSMKMASEMETLDDQMYETPTAFQQLMCGSTIKESAGFFKDESTTLDEAEIKMLDLYCEKARIEDGQKILDLGCGHGAVMLHIAQKYKNCNVTGVTNSISQQQFIVQRSKELNLSNVNMILADVTMLEMDATYDRIFIIGLIEHMKNFELFLRKISKWITKEGLLFLEHYCHKTFAYQCEPVDEDDWYNMFIFPPGTLILPSASFLLYFQDDLIVVDRWTLNGNHYARTQEEWLKRIDANVDGVKQMFESVCDGNKEEAVKLMNFWRIFCISGAEMLAYNNGEEWMISHYLFKKRN

SEQ ID NO: 172 - protein, 357 aa, Nigella sativa
MEATQITKKQGVAELIKRIENGQVPDEEITRMMKIQIQKRLKLGYKSTHEQQLAQLLHFVHSLQKMEMAEEVDTLDSELYEIPLPFLHIMCGKALKFSPGYFKDESTTLDESEVNMLDLYCERAQIEDGQTILDLGCGHGSLTLHVAKKYRGCKVTGITNSVSQKDFIMEECKKLNLSNVEIILEDVTKFETGTTYDRIFAVALIEHMKNYELFLKKVSAWMAQDGLLFVEHHCHKVFAYKYEPIDDDDWYTEYIFPTGTLVMSSSSILLYFQEDVSVVNHWTLSGKHPSLGFKQWLKRIDDNIDEIKEIFESFYGSKEKATKFITYWRVFCIAHSEMYATNGGEEWMLSQVLFKRK

SEQ ID NO: 173 - protein, 349 aa, Sanguinaria canadensis
MGGVADLLKKMELGLVPEEEIRRLMRIIIEKRLEWGYKPTHAEQLDHLTNFIQCLRGMKMADEIDALDAKMYEIPLPFMQTICGSTLKFSPGYFKDESTTLDESEIHMMDLYCERAEVKDGHSILDLGCGHGGFVLHVAQKYKNSIVTGVTNSVAEKEFIMTQCKKLCLSNVEIILADVTKFEPETTYDRVFAIALIEHMKNYELVLEKLSKWVAQDGFLFVEHHCHKVFPYKYEPLDEDDWYTEYIFPGGTIVLPSASILLYFQKDVSVVNHWSLNGKHPARGFKEWLKRLDENMDAVKAIFEPFYGSKEEAMKWITYWRVFCITHSEMYAYNNGEEWMLSQVLFKRK

SEQ ID NO: 174 - protein, 350 aa, Jeffersonia diphylla
MSKGVAKLVERMELGLVSDDEVRRLMRILIEKRLKWGYKPTHEEQLTYLTNFIQGLKGMKIAEEIDALDAKMYEIPIAFMQILCGYSLKFSPGFFEDESTTLDESETIMMDLYCERAQVQDGQSILDLGCGHGGFVLHVAQKYKNCKVTGVTNSVSETEYIMEQCKKLGLSNVEIIIADVTKFEPEVTYDRVFAIALIEHMKNYELVLQKLSKWVAQDGFLFVDHHCHKVFPYKYEPIDEDDWYTQYIFPGGTLVLPSASILLYFQEDVSIVNHWTLSGNHPARGFKEWLKRLDDNMDEIKAIFEPFYGSKEEAMKWITYWRVFCITHSEMYAYNGGEEWMISQVLFKRK

SEQ ID NO: 175 - protein, 357 aa, Berberis thunbergii
MEVKQAGKEGVTELLVKRMELGLVPEEEIRRLMRIQIQKRLDWGYKPTHEEQLAHLTKFIQNIRGMKMADEIDALDAKMYEIPLPFLQTICGKTLKFSPGYFKDESTTLDESETLMMDLYCERAQVKDGQSILDLGCGHGGFVLHLAQKYRNSVVTGVTNSVSETEYIKEQCKKLGLSNVEIIIADVTKFEPEVTYDRVFAIALIEHMKNYALVLNKISKWVAQDGYLFVEHHCHKVFPYKYEPLDEDDWYTNYIFPGGTLILPSASILLYFQEDVTVLNHWSLSGKHPSRGFIEWLKRLDENIDVIMGIFEPFYGSKEEATKWINYWRVFCMTHSEMYAYGNGEEWMLSQVLLKRK

SEQ ID NO: 176 - protein, 339 aa, Mahonia aquifolium
MELGLVPEKEIRRLMRIQIQKRLEWGYKPTHEEQLAHLTKFIQNIRGMKMADEIDALDAKMYEIPLPFLQTICGKTLKFSPGYFKDESTTLDESETLMMDLYCERAQVKDGQSILDLGCGHGGFVLHLAQKYRNSIVTGVTNSVSETEYIKEQCKKLGLSNVEIIIADVTKFEPEVTYDRVFAIALIEHMKNYALVLNKISKWVAQDGYLFVEHHCHKVFPYKYEPLDEDDWYTNYIFPGGTLILPSASILLYFQEDVTVLNHWSLSGKHPSRGFIEWLKRLDENIDVIMGIFEPFYGSKEEATKWINYWRVFCITHSEMYAYGNGEEWMLSQVLLKRK

SEQ ID NO: 177 - protein, 355 aa, Menispermum canadense
  MOD_RES (86)..(86): Any amino acid
  MOD_RES (96)..(96): Any amino acid
  MOD_RES (127)..(127): Any amino acid
  MOD_RES (138)..(138): Any amino acid
  MOD_RES (153)..(153): Any amino acid
  MOD_RES (292)..(292): Any amino acid
MDKANERELKRAELFKKLEDDLVTYDEIKQVMRTELAKRLEWGYKPTHQQQLAHLLDFAHALEGMKIANEVETLASEVYETPLPFXEIVLGPAKKXSSCLFEDESTTLEQAEIAMLDLYFERAQIRXGMSVLDLGCGXGSVGLHIARKYKNCXVTCITNSISQKQYIENQCKLYNLSNVKIILADIVAHDTDDTFDVVLVIGVIEHMKNYALLLNKISKWMAKDGLLFVEHLCHKTFPYHFEPLDEDDWYSNFVFPTGTLTMPSVSFLLYFQADVSILNHWILSGKNFSRTXEEFLKRIDANVDAIKDGLKPSLGSEGVAKLISYWRGFCLTGMEMFGYNNGEEWMVSQVLFKNK

SEQ ID NO: 178 - protein, 366 aa, Tinospora cordifolia
MEDNNNLLQEEMNVVELLQRPELGLVPDEKIRKLTRLQLQKRLKWGYKPTHEAQLSHLFQFIHSLPSLNMESEDENPKSWLYETPTSFLQLLYGDCIKESDTYYKEDTATLEEAVINMLELYCERARITEGLSVLDLGCGYGALTLHVAQKYKSCKVTGVTSSISQKQYIMEKCKKLNLTNVEIILADVATIEIEAASYDRIFALGIFEHVNDYKLFLGKLSKWMKQDGLLFVEYLCHKTFPYQNKPLDKGDKWYNEYVFPSGGLIIPSASFILYFQNDVSVVRQWTQGGQHSARTFEELLKRIDGNIDKIKEIFIESYGSKEDAVRFINYWRVFLITGVEMFSYNDGEEWMGAHFLFKKKFIMQE

SEQ ID NO: 179 - protein, 359 aa, Cissampelos mucronata
MEVKQSKGDELRSRVAELLERPELGLVPDEEIRRLAKARLEKRLKWGYKATHGEQLSSLLQFVESLPSLNMASEDDSPKAWLYETPTSFLQLIYGDIIKESGSYYKDESTTLEEAMIHNMNLCCERANIKEGQSVVDLGCGYGAFILHVAQKYKTCRVTGITSSISQKHYIMEQCKKLNLSNVEVILADVATIKLDATFDRVFAAGMFEHVNDYKSFLRKITNWMKPDGRLFVEHLCNKTFPYQNKPLDDGDNWGEYVFPSGGLIIPSASLLLYFQEDVSIVNHWTFSGKHAANKFEELLKRIDAKIDAIKRIFNECYGSKDSIRFINYWRVFLITAAEMFGYNNGEEWMGVHLLFKKK

SEQ ID NO: 180 - protein, 352 aa, Cocculus trilobus
GLKSSVAELLERPELGLVPDGEIRKLTKTRLAKRLEWGYKATHEDQLSHLLRFIHSLPSLNMASEDDSPKAWLYETPTSFLQLIYGDIIKESGTYYKDESSTLEEAIIHNMDLCCERARIKEGQSVLDLGCGYGAFTLHVAQKYKSCSVTGITSSISQKDYIMEQCKKLNLSNVEVILADVATIKMNTTFDRVFALGMFEHINDYKLFLRRISNWMKHDGLLFVEHLCNKTFAYQNKPLDDGDDWFNEYVFPSAGLIIPSASLLLYFQEDVSIVHHWTFSGKHAAYKFEELLERIDAKIEAIKEIFIECYGSKEDAIRFINYWRVFLITAAEMFAYRDGEEWMGSHVLFKKK

SEQ ID NO: 181 - protein, 364 aa, Cissampelos mucronata
MEAKQHESNNNIDEELKNRVNIGEQEERPGFEDEEIRRLAKAQLAKRLKWGYKPTHEQQLSHLLQFLQSLPSLNMASEDESSKAWLYETPTSFLQLLFGNVIKFSGYYYKHESSTFEESMIHNMDLCCERANIKEGQNVIDLGCGYGAFVLHVAQKYKSCSVTGITCSITQKHHIMEECKKLNLCNVKVILADVATIELGTAFDRVFAFGMFEEINDYKLILRKISNWMKPDGLFFVEHLCHKTLAYQNKLIDDQDWYEEYIFPSGGLIVPSASLLLYFQDDLSVVYHWTYNGKHGARSFEKMLERTDANIDTIKDMFTEFYGSKEKAIKFINYWRVFFITAAEMFAYNDGEEWMCSQLLFKKK

SEQ ID NO: 182 - protein, 364 aa, Cissampelos mucronata
MEHKIEDIRKLKSRVEEQLERPELGLVKDEDIKTLAKAKLEKRLKWGYKPTYAEQLSNLLQFAQSLPSLKMENVDDQGSSKQWLYGVPSEFLQIIYGGIIKMSGSYYEDESTTLEESMIKDMDSCCEKANVKEGHSVLDIGCGYGSLIIHIAKKYRTCNVTGITNFVEQKQYIMEECKKLNLSNVEVIVGDGTTINLNTTTFDRVFVTGMLEEINDYKLFLKSVSDWMKPDGLLLVTHFCHKTFAYQNNKALDDEDWHNEYIFPSGNLIVPSASLLLYFQEDLSVVSHWATNGTHTGRTCKKLVERIDANIEKIKEIFSEFYGSKEDAIRMINYWRVLCITGAEMYTCKDGEEWMDVYYLFKKK

SEQ ID NO: 183 - protein, 1049 aa, Artificial Sequence
  Description of Artificial Sequence: Synthetic polypeptide
MTIKEMPQPKTFGELKNLPLLNTDKPVQALMKIADELGEIFKFEAPGRVTRYLSSQRLIKEACDESRFDKNLSQALKFARDFAGDGLVTSWTHEKNWKKAHNILLPSFSQQAMKGYHAMMVDIAVQLVQKWERLNADEHIEVSEDMTRLTLDTIGLCGFNYRFNSFYRDQPHPFIISMVRALDEVMNKLQRANPDDPAYDENKRQFQEDIKVMNDLVDKIIADRKARGEQSDDLLTQMLNGKDPETGEPLDDGNIRYQIITFLIAGHETTSGLLSFALYFLVKNPHVLQKVAEEAARVLVDPVPSYKQVKQLKYVGMVLNEALRLWPTAPAFSLYAKEDTVLGGEYPLEKGDEVMVLIPQLHRDKTVWGDDVEEFRPERFENPSAIPQHAFKPFGNGQRACIGQQFALHEATLVLGMMLKHFDFEDHTNYELDIKETATLKPKGFVVKAKSKKIPLGGIPSPSTEQSAKKVRKKAENAHNTPLLVLYGSNMGTAEGTARDLADIAMSKGFAPQVATLDSHAGNLPREGAVLIVTASYNGHPPDNAKQFVDWLDQASADEVKGVRYSVFGCGDKNWATTYQKVPAFIDETLAAKGAENIADRGEADASDDFEGTYEEWREHMWSDVAAYFNLDIENSEDNKSTLSLQFVDSAADMPLAKMHGAFSTNVVASKELQQPGSARSTRHLEIELPKEASYQEGDHLGVIPRNYEGIVNRVTARFGLDASQQIRLEAEEEKLAHLPLAKTVSVEELLQYVELQDPVTRTQLRAMAAKTVCPPHKVELEALLEKQAYKEQVLAKRLTMLELLEKYPACEMKFSEFIALLPSIRPRYYSISSSPRVDEKQASITVSVVSGEAWSGYGEYKGIASNYLAELQEGDTITCFISTPQSEFTLPKDPETPLIMVGPGTGVAPFRGFVQARKQLKEQGQSLGEAHLYFGCRSPHEDYLYQEELENAQSEGIITLHTAFSRMPNQPKTYVQHVMEQDGKKLIELLDQGAHFYICGDGSQMAPAVEATLMKSYADVHQVSEADARLWLQQLEEKGRYAKDVWAG

SEQ ID NO: 184 - protein, 1049 aa, Artificial Sequence
  Description of Artificial Sequence: Synthetic polypeptide
MTIKEMPQPKTFGELKNLPLLNTDKPVQALMKIADELGEIFKFEAPGRVTRYLSSQRLIKEACDESRFDKNLSQALKFARDFAGDGLVTSWTHEKNWKKAHNILLPSFSQQAMKGYHAMMVDIAVQLVQKWERLNADEHIEVSEDMTRLTLDTIGLCGFNYRFNSFYRDQPHPFIISMVRAADEVMNKLQRANPDDPAYDENKRQFQEDIKVMNDLVDKIIADRKARGEQSDDLLTQMLNGKDPETGEPLDDGNIRYQIIAFLIAGHETTSGLLSFALYFLVKNPHVLQKVAEEAARVLVDPVPSYKQVKQLKYVGMVLNEALRLWPTAPAFSLYAKEDTVLGGEYPLEKGDEVMVLIPQLHRDKTVWGDDVEEFRPERFENPSAIPQHAFKPFGNGQRACIGQQFALHEATLVLGMMLKHFDFEDHTNYELDIKETATLKPKGFVVKAKSKKIPLGGIPSPSTEQSAKKVRKKAENAHNTPLLVLYGSNMGTAEGTARDLADIAMSKGFAPQVATLDSHAGNLPREGAVLIVTASYNGHPPDNAKQFVDWLDQASADEVKGVRYSVFGCGDKNWATTYQKVPAFIDETLAAKGAENIADRGEADASDDFEGTYEEWREHMWSDVAAYFNLDIENSEDNKSTLSLQFVDSAADMPLAKMHGAFSTNVVASKELQQPGSARSTRHLEIELPKEASYQEGDHLGVIPRNYEGIVNRVTARFGLDASQQIRLEAEEEKLAHLPLAKTVSVEELLQYVELQDPVTRTQLRAMAAKTVCPPHKVELEALLEKQAYKEQVLAKRLTMLELLEKYPACEMKFSEFIALLPSIRPRYYSISSSPRVDEKQASITVSVVSGEAWSGYGEYKGIASNYLAELQEGDTITCFISTPQSEFTLPKDPETPLIMVGPGTGVAPFRGFVQARKQLKEQGQSLGEAHLYFGCRSPHEDYLYQEELENAQSEGIITLHTAFSRMPNQPKTYVQHVMEQDGKKLIELLDQGAHFYICGDGSQMAPAVEATLMKSYADVHQVSEADARLWLQQLEEKGRYAKDVWAG

SEQ ID NO: 185 - protein, 1049 aa, Artificial Sequence; identical to SEQ ID NO: 118
  Description of Artificial Sequence: Synthetic polypeptide

SEQ ID NO: 186 - protein, 1049 aa, Artificial Sequence
  Description of Artificial Sequence: Synthetic polypeptide
MTIKEMPQPKTFGELKNLPLLNTDKPVQALMKIADELGEIFKFEAPGRVTRYLSSQRLIKEACDESRFDKNLSQAAKFARDFAGDGLVTSWTHEKNWKKAHNILLPSFSQQAMKGYHAMMVDIAVQLVQKWERLNADEHIEVSEDMTRLTLDTIGLCGFNYRFNSFYRDQPHPFIISAVRAADEVMNKLQRANPDDPAYDENKRQFQEDIKVMNDLVDKIIADRKARGEQSDDLLTQMLNGKDPETGEPLDDGNIRYQIITFLIAGHETTSGLLSFALYFLVKNPHVLQKVAEEAARVLVDPVPSYKQVKQLKYVGMVLNEALRLWPTAPAFSLYAKEDTVLGGEYPLEKGDEVMVLIPQLHRDKTVWGDDVEEFRPERFENPSAIPQHAFKPFGNGQRACIGQQFALHEATLVLGMMLKHFDFEDHTNYELDIKETLTLKPKGFVVKAKSKKIPLGGIPSPSTEQSAKKVRKKAENAHNTPLLVLYGSNMGTAEGTARDLADIAMSKGFAPQVATLDSHAGNLPREGAVLIVTASYNGHPPDNAKQFVDWLDQASADEVKGVRYSVFGCGDKNWATTYQKVPAFIDETLAAKGAENIADRGEADASDDFEGTYEEWREHMWSDVAAYFNLDIENSEDNKSTLSLQFVDSAADMPLAKMHGAFSTNVVASKELQQPGSARSTRHLEIELPKEASYQEGDHLGVIPRNYEGIVNRVTARFGLDASQQIRLEAEEEKLAHLPLAKTVSVEELLQYVELQDPVTRTQLRAMAAKTVCPPHKVELEALLEKQAYKEQVLAKRLTMLELLEKYPACEMKFSEFIALLPSIRPRYYSISSSPRVDEKQASITVSVVSGEAWSGYGEYKGIASNYLAELQEGDTITCFISTPQSEFTLPKDPETPLIMVGPGTGVAPFRGFVQARKQLKEQGQSLGEAHLYFGCRSPHEDYLYQEELENAQSEGIITLHTAFSRMPNQPKTYVQHVMEQDGKKLIELLDQGAHFYICGDGSQMAPAVEATLMKSYADVHQVSEADARLWLQQLEEKGRYAKDVWAG

SEQ ID NO: 187 - protein, 1049 aa, Artificial Sequence
  Description of Artificial Sequence: Synthetic polypeptide
MTIKEMPQPKTFGELKNLPLLNTDKPVQALMKIADELGEIFKFEAPGRVTRYLSSQRLIKEACDESRFDKNLSQAAKFARDFAGDGLVTSWTHEKNWKKAHNILLPSFSQQAMKGYHAMMVDIAVQLVQKWERLNADEHIEVSEDMTRLTLDTIGLCGFNYRFNSFYRDQPHPFIISAVRAADEVMNKLQRANPDDPAYDENKRQFQEDIKVMNDLVDKIIADRKARGEQSDDLLTQMLNGKDPETGEPLDDGNIRYQIIAFLIAGHETTSGLLSFALYFLVKNPHVLQKVAEEAARVLVDPVPSYKQVKQLKYVGMVLNEALRLWPTAPAFSLYAKEDTVLGGEYPLEKGDEVMVLIPQLHRDKTVWGDDVEEFRPERFENPSAIPQHAFKPFGNGQRACIGQQFALHEATLVLGMMLKHFDFEDHTNYELDIKETLTLKPKGFVVKAKSKKIPLGGIPSPSTEQSAKKVRKKAENAHNTPLLVLYGSNMGTAEGTARDLADIAMSKGFAPQVATLDSHAGNLPREGAVLIVTASYNGHPPDNAKQFVDWLDQASADEVKGVRYSVFGCGDKNWATTYQKVPAFIDETLAAKGAENIADRGEADASDDFEGTYEEWREHMWSDVAAYFNLDIENSEDNKSTLSLQFVDSAADMPLAKMHGAFSTNVVASKELQQPGSARSTRHLEIELPKEASYQEGDHLGVIPRNYEGIVNRVTARFGLDASQQIRLEAEEEKLAHLPLAKTVSVEELLQYVELQDPVTRTQLRAMAAKTVCPPHKVELEALLEKQAYKEQVLAKRLTMLELLEKYPACEMKFSEFIALLPSIRPRYYSISSSPRVDEKQASITVSVVSGEAWSGYGEYKGIASNYLAELQEGDTITCFISTPQSEFTLPKDPETPLIMVGPGTGVAPFRGFVQARKQLKEQGQSLGEAHLYFGCRSPHEDYLYQEELENAQSEGIITLHTAFSRMPNQPKTYVQHVMEQDGKKLIELLDQGAHFYICGDGSQMAPAVEATLMKSYADVHQVSEADARLWLQQLEEKGRYAKDVWAG

SEQ ID NO: 188 - DNA, 3150 bp, Artificial Sequence
  Description of Artificial Sequence: Synthetic polynucleotide
atgaccatcaaagaaatgccacaacctaagactttcggtgaattgaagaatttgcctttgttgaacaccgataagccagttcaagctttgatgaagattgctgatgaattgggtgaaatcttcaagtttgaagctccaggtagagtcactagatacttgtcatctcaaagattgatcaaagaagcctgcgacgaatccagatttgataagaatttgtctcaagctttgaagttcgctagagattttgctggtgatggtttggttacttcttggactcacgaaaagaattggaagaaggcccataacattttgttgccatctttctcacaacaagccatgaagggttatcatgctatgatggttgatatcgccgttcaattggttcaaaagtgggaaagattgaacgccgatgaacatatcgaagtctctgaagatatgaccagattgaccttggataccattggtttgtgtggtttcaactacagattcaactccttctacagagatcaaccacatccattcatcatctctatggttagagctttggatgaagtcatgaacaaattgcaaagagctaatccagacgatccagcttatgacgaaaacaagagacaattccaagaagatatcaaggtcatgaacgatttggtcgataagattatcgctgatagaaaggctagaggtgaacaatctgatgatttgttgacccaaatgttgaacggtaaggatccagaaactggtgaaccattggatgatggtaacatcagataccaaattatcaccttcttgattgctggtcacgaaactacatctggtttgttgtcttttgccttgtactttttggttaagaacccacacgtcttgcaaaaggttgctgaagaagctgcaagagttttggttgatccagttccatcttacaagcaagtcaagcaattgaagtacgttggtatggttttgaacgaagctttgagattgtggccaactgctccagctttttcattatacgctaaagaagataccgtcttgggtggtgaatatccattggaaaaaggtgatgaagttatggtcttgatcccacaattgcatagagataagactgtttggggtgatgatgtcgaagaattcagaccagaaagattcgaaaacccatctgctattccacaacatgcttttaagccatttggtaacggtcaaagagcttgcattggtcaacaattcgctttacatgaagctaccttggttttgggtatgatgttgaaacacttcgacttcgaagatcacaccaactacgaattggatatcaaagaaaccgctaccttgaagccaaagggttttgttgttaaggctaagtccaaaaagattccattgggtggtattccatctccatctactgaacaatccgctaagaaggttagaaagaaagctgaaaacgctcataacacacctttgttggtcttgtacggttctaatatgggtactgctgaaggtacagcaagagatttggcagatattgctatgtctaaaggtttcgctccacaagttgctactttggattctcatgctggtaatttgccaagagaaggtgctgttttgatagttactgcttcttacaatggtcacccaccagataatgctaagcaattcgttgattggttggatcaagcttcagctgatgaagtaaaaggtgttagatactctgttttcggttgcggtgacaaaaattgggctactacttatcaaaaggttccagcctttattgacgaaactttggctgctaaaggtgctgaaaacattgctgacagaggtgaagctgatgcctccgacgacttcgaaggtacttacgaagaatggagagaacacatgtggtctgacgttgctgcttacttcaacttggacatcgaaaactctgaagacaacaagtccactttgtctttgcaattcgttgactccgctgctgacatgccattggctaagatgcacggtgctttctctaccaacgtcgttgcctccaaggaattgcaacaaccaggttctgctagatctactagacacttggaaatcgaattgccaaaggaagcttcctaccaagaaggtgaccacttgggcgttattccaagaaactacgaaggtatcgtcaacagagttactgctagattcggtttggatgcttctcaacaaatcagattagaagctgaagaagaaaagttggctcacttgccattagctaagactgtctccgttgaagaattgttgcaatacgtcgaattgcaagacccagttaccagaacccaattgagagccatggctgccaagaccgtctgtccaccacacaaggttgaattggaagccttgttggaaaagcaagcctacaaggaacaagttttggctaagagattgaccatgttggaattgttggaaaagtacccagcctgcgaaatgaagttctctgaatttatcgccttgttgccatctatcagaccacgttactactctatttcttcctctccacgtgttgacgaaaagcaagcttctattactgtttccgttgtctccggtgaagcttggtccggttacggtgaatacaagggtattgcttctaactacttggctgaattgcaagaaggtgacaccattacttgtttcatctctactccacaatccgaatttactttgccaaaggacccagaaactccattgatcatggttggtccaggtactggtgtcgctccattcagaggtttcgttcaagctagaaaacaattgaaggaacaaggtcaatctttgggtgaagctcacttgtacttcggttgtagatctccacacgaagactacttataccaagaagaattggaaaacgctcaatccgaaggtattatcactttgcacaccgctttctccagaatgccaaaccaaccaaagacttacgtccaacacgttatggaacaagacggtaagaagttgattgaattgttggaccaaggtgctcacttctacatttgtggtgatggttctcaaatggctccagccgttgaagccactttgatgaagtcttacgctgatgttcaccaagtttccgaagccgatgctagattatggttgcaacaattggaagaaaaaggtcgttacgctaaggatgtctgggccggttga

SEQ ID NO: 189 - DNA, 3150 bp, Artificial Sequence
  Description of Artificial Sequence: Synthetic polynucleotide
atgaccatcaaagaaatgccacaacctaagactttcggtgaattgaagaatttgcctttgttgaacaccgataagccagttcaagctttgatgaagattgctgatgaattgggtgaaatcttcaagtttgaagctccaggtagagtcactagatacttgtcatctcaaagattgatcaaagaagcctgcgacgaatccagatttgataagaatttgtctcaagctttgaagttcgctagagattttgctggtgatggtttggttacttcttggactcacgaaaagaattggaagaaggcccataacattttgttgccatctttctcacaacaagccatgaagggttatcatgctatgatggttgatatcgccgttcaattggttcaaaagtgggaaagattgaacgccgatgaacatatcgaagtctctgaagatatgaccagattgaccttggataccattggtttgtgtggtttcaactacagattcaactccttctacagagatcaaccacatccattcatcatctctatggttagagctgcagatgaagtcatgaacaaattgcaaagagctaatccagacgatccagcttatgacgaaaacaagagacaattccaagaagatatcaaggtcatgaacgatttggtcgataagattatcgctgatagaaaggctagaggtgaacaatctgatgatttgttgacccaaatgttgaacggtaaggatccagaaactggtgaaccattggatgatggtaacatcagataccaaattatcgctttcttgattgctggtcacgaaactacatctggtttgttgtcttttgccttgtactttttggttaagaacccacacgtcttgcaaaaggttgctgaagaagctgcaagagttttggttgatccagttccatcttacaagcaagtcaagcaattgaagtacgttggtatggttttgaacgaagctttgagattgtggccaactgctccagctttttcattatacgctaaagaagataccgtcttgggtggtgaatatccattggaaaaaggtgatgaagttatggtcttgatcccacaattgcatagagataagactgtttggggtgatgatgtcgaagaattcagaccagaaagattcgaaaacccatctgctattccacaacatgcttttaagccatttggtaacggtcaaagagcttgcattggtcaacaattcgctttacatgaagctaccttggttttgggtatgatgttgaaacacttcgacttcgaagatcacaccaactacgaattggatatcaaagaaaccgctaccttgaagccaaagggttttgttgttaaggctaagtccaaaaagattccattgggtggtattccatctccatctactgaacaatccgctaagaaggttagaaagaaagctgaaaacgctcataacacacctttgttggtcttgtacggttctaatatgggtactgctgaaggtacagcaagagatttggcagatattgctatgtctaaaggtttcgctccacaagttgctactttggattctcatgctggtaatttgccaagagaaggtgctgttttgatagttactgcttcttacaatggtcacccaccagataatgctaagcaattcgttgattggttggatcaagcttcagctgatgaagtaaaaggtgttagatactctgttttcggttgcggtgacaaaaattgggctactacttatcaaaaggttccagcctttattgacgaaactttggctgctaaaggtgctgaaaacattgctgacagaggtgaagctgatgcctccgacgacttcgaaggtacttacgaagaatggagagaacacatgtggtctgacgttgctgcttacttcaacttggacatcgaaaactctgaagacaacaagtccactttgtctttgcaattcgttgactccgctgctgacatgccattggctaagatgcacggtgctttctctaccaacgtcgttgcctccaaggaattgcaacaaccaggttctgctagatctactagacacttggaaatcgaattgccaaaggaagcttcctaccaagaaggtgaccacttgggcgttattccaagaaactacgaaggtatcgtcaacagagttactgctagattcggtttggatgcttctcaacaaatcagattagaagctgaagaagaaaagttggctcacttgccattagctaagactgtctccgttgaagaattgttgcaatacgtcgaattgcaagacccagttaccagaacccaattgagagccatggctgccaagaccgtctgtccaccacacaaggttgaattggaagccttgttggaaaagcaagcctacaaggaacaagttttggctaagagattgaccatgttggaattgttggaaaagtacccagcctgcgaaatgaagttctctgaatttatcgccttgttgccatctatcagaccacgttactactctatttcttcctctccacgtgttgacgaaaagcaagcttctattactgtttccgttgtctccggtgaagcttggtccggttacggtgaatacaagggtattgcttctaactacttggctgaattgcaagaaggtgacaccattacttgtttcatctctactccacaatccgaatttactttgccaaaggacccagaaactccattgatcatggttggtccaggtactggtgtcgctccattcagaggtttcgttcaagctagaaaacaattgaaggaacaaggtcaatctttgggtgaagctcacttgtacttcggttgtagatctccacacgaagactacttataccaagaagaattggaaaacgctcaatccgaaggtattatcactttgcacaccgctttctccagaatgccaaaccaaccaaagacttacgtccaacacgttatggaacaagacggtaagaagttgattgaattgttggaccaaggtgctcacttctacatttgtggtgatggttctcaaatggctccagccgttgaagccactttgatgaagtcttacgctgatgttcaccaagtttccgaagccgatgctagattatggttgcaacaattggaagaaaaaggtcgttacgctaaggatgtctgggccggttga

SEQ ID NO: 190 - DNA, 3150 bp, Artificial Sequence
  Description of Artificial Sequence: Synthetic polynucleotide
atgaccatcaaagaaatgccacaacctaagactttcggtgaattgaagaatttgcctttgttgaacaccgataagccagttcaagctttgatgaagattgctgatgaattgggtgaaatcttcaagtttgaagctccaggtagagtcactagatacttgtcatctcaaagattgatcaaagaagcctgcgacgaatccagatttgataagaatttgtctcaagctgctaagttcgctagagattttgctggtgatggtttggttacttcttggactcacgaaaagaattggaagaaggcccataacattttgttgccatctttctcacaacaagccatgaagggttatcatgctatgatggttgatatcgccgttcaattggttcaaaagtgggaaagattgaacgccgatgaacatatcgaagtctctgaagatatgaccagattgaccttggataccattggtttgtgtggtttcaactacagattcaactccttctacagagatcaaccacatccattcatcatctctatggttagagctgcagatgaagtcatgaacaaattgcaaagagctaatccagacgatccagcttatgacgaaaacaagagacaattccaagaagatatcaaggtcatgaacgatttggtcgataagattatcgctgatagaaaggctagaggtgaacaatctgatgatttgttgacccaaatgttgaacggtaaggatccagaaactggtgaaccattggatgatggtaacatcagataccaaattatcaccttcttgattgctggtcacgaaactacatctggtttgttgtcttttgccttgtactttttggttaagaacccacacgtcttgcaaaaggttgctgaagaagctgcaagagttttggttgatccagttccatcttacaagcaagtcaagcaattgaagtacgttggtatggttttgaacgaagctttgagattgtggccaactgctccagctttttcattatacgctaaagaagataccgtcttgggtggtgaatatccattggaaaaaggtgatgaagttatggtcttgatcccacaattgcatagagataagactgtttggggtgatgatgtcgaagaattcagaccagaaagattcgaaaacccatctgctattccacaacatgcttttaagccatttggtaacggtcaaagagcttgcattggtcaacaattcgctttacatgaagctaccttggttttgggtatgatgttgaaacacttcgacttcgaagatcacaccaactacgaattggatatcaaagaaaccttgaccttgaagccaaagggttttgttgttaaggctaagtccaaaaagattccattgggtggtattccatctccatctactgaacaatccgctaagaaggttagaaagaaagctgaaaacgctcataacacacctttgttggtcttgtacggttctaatatgggtactgctgaaggtacagcaagagatttggcagatattgctatgtctaaaggtttcgctccacaagttgctactttggattctcatgctggtaatttgccaagagaaggtgctgttttgatagttactgcttcttacaatggtcacccaccagataatgctaagcaattcgttgattggttggatcaagcttcagctgatgaagtaaaaggtgttagatactctgttttcggttgcggtgacaaaaattgggctactacttatcaaaaggttccagcctttattgacgaaactttggctgctaaaggtgctgaaaacattgctgacagaggtgaagctgatgcctccgacgacttcgaaggtacttacgaagaatggagagaacacatgtggtctgacgttgctgcttacttcaacttggacatcgaaaactctgaagacaacaagtccactttgtctttgcaattcgttgactccgctgctgacatgccattggctaagatgcacggtgctttctctaccaacgtcgttgcctccaaggaattgcaacaaccaggttctgctagatctactagacacttggaaatcgaattgccaaaggaagcttcctaccaagaaggtgaccacttgggcgttattccaagaaactacgaaggtatcgtcaacagagttactgctagattcggtttggatgcttctcaacaaatcagattagaagctgaagaagaaaagttggctcacttgccattagctaagactgtctccgttgaagaattgttgcaatacgtcgaattgcaagacccagttaccagaacccaattgagagccatggctgccaagaccgtctgtccaccacacaaggttgaattggaagccttgttggaaaagcaagcctacaaggaacaagttttggctaagagattgaccatgttggaattgttggaaaagtacccagcctgcgaaatgaagttctctgaatttatcgccttgttgccatctatcagaccacgttactactctatttcttcctctccacgtgttgacgaaaagcaagcttctattactgtttccgttgtctccggtgaagcttggtccggttacggtgaatacaagggtattgcttctaactacttggctgaattgcaagaaggtgacaccattacttgtttcatctctactccacaatccgaatttactttgccaaaggacccagaaactccattgatcatggttggtccaggtactggtgtcgctccattcagaggtttcgttcaagctagaaaacaattgaaggaacaaggtcaatctttgggtgaagctcacttgtacttcggttgtagatctccacacgaagactacttataccaagaagaattggaaaacgctcaatccgaaggtattatcactttgcacaccgctttctccagaatgccaaaccaaccaaagacttacgtccaacacgttatggaacaagacggtaagaagttgattgaattgttggaccaaggtgctcacttctacatttgtggtgatggttctcaaatggctccagccgttgaagccactttgatgaagtcttacgctgatgttcaccaagtttccgaagccgatgctagattatggttgcaacaattggaagaaaaaggtcgttacgctaaggatgtctgggccggttga

SEQ ID NO: 191 - DNA, 3150 bp, Artificial Sequence
  Description of Artificial Sequence: Synthetic polynucleotide
atgaccatcaaagaaatgccacaacctaagactttcggtgaattgaagaatttgcctttgttgaacaccgataagccagttcaagctttgatgaagattgctgatgaattgggtgaaatcttcaagtttgaagctccaggtagagtcactagatacttgtcatctcaaagattgatcaaagaagcctgcgacgaatccagatttgataagaatttgtctcaagctgctaagttcgctagagattttgctggtgatggtttggttacttcttggactcacgaaaagaattggaagaaggcccataacattttgttgccatctttctcacaacaagccatgaagggttatcatgctatgatggttgatatcgccgttcaattggttcaaaagtgggaaagattgaacgccgatgaacatatcgaagtctctgaagatatgaccagattgaccttggataccattggtttgtgtggtttcaactacagattcaactccttctacagagatcaaccacatccattcatcatctctgctgttagagctgcagatgaagtcatgaacaaattgcaaagagctaatccagacgatccagcttatgacgaaaacaagagacaattccaagaagatatcaaggtcatgaacgatttggtcgataagattatcgctgatagaaaggctagaggtgaacaatctgatgatttgttgacccaaatgttgaacggtaaggatccagaaactggtgaaccattggatgatggtaacatcagataccaaattatcaccttcttgattgctggtcacgaaactacatctggtttgttgtcttttgccttgtactttttggttaagaacccacacgtcttgcaaaaggttgctgaagaagctgcaagagttttggttgatccagttccatcttacaagcaagtcaagcaattgaagtacgttggtatggttttgaacgaagctttgagattgtggccaactgctccagctttttcattatacgctaaagaagataccgtcttgggtggtgaatatccattggaaaaaggtgatgaagttatggtcttgatcccacaattgcatagagataagactgtttggggtgatgatgtcgaagaattcagaccagaaagattcgaaaacccatctgctattccacaacatgcttttaagccatttggtaacggtcaaagagcttgcattggtcaacaattcgctttacatgaagctaccttggttttgggtatgatgttgaaacacttcgacttcgaagatcacaccaactacgaattggatatcaaagaaaccttgaccttgaagccaaagggttttgttgttaaggctaagtccaaaaagattccattgggtggtattccatctccatctactgaacaatccgctaagaaggttagaaagaaagctgaaaacgctcataacacacctttgttggtcttgtacggttctaatatgggtactgctgaaggtacagcaagagatttggcagatattgctatgtctaaaggtttcgctccacaagttgctactttggattctcatgctggtaatttgccaagagaaggtgctgttttgatagttactgcttcttacaatggtcacccaccagataatgctaagcaattcgttgattggttggatcaagcttcagctgatgaagtaaaaggtgttagatactctgttttcggttgcggtgacaaaaattgggctactacttatcaaaaggttccagcctttattgacgaaactttggctgctaaaggtgctgaaaacattgctgacagaggtgaagctgatgcctccgacgacttcgaaggtacttacgaagaatggagagaacacatgtggtctgacgttgctgcttacttcaacttggacatcgaaaactctgaagacaacaagtccactttgtctttgcaattcgttgactccgctgctgacatgccattggctaagatgcacggtgctttctctaccaacgtcgttgcctccaaggaattgcaacaaccaggttctgctagatctactagacacttggaaatcgaattgccaaaggaagcttcctaccaagaaggtgaccacttgggcgttattccaagaaactacgaaggtatcgtcaacagagttactgctagattcggtttggatgcttctcaacaaatcagattagaagctgaagaagaaaagttggctcacttgccattagctaagactgtctccgttgaagaattgttgcaatacgtcgaattgcaagacccagttaccagaacccaattgagagccatggctgccaagaccgtctgtccaccacacaaggttgaattggaagccttgttggaaaagcaagcctacaaggaacaagttttggctaagagattgaccatgttggaattgttggaaaagtacccagcctgcgaaatgaagttctctgaatttatcgccttgttgccatctatcagaccacgttactactctatttcttcctctccacgtgttgacgaaaagcaagcttctattactgtttccgttgtctccggtgaagcttggtccggttacggtgaatacaagggtattgcttctaactacttggctgaattgcaagaaggtgacaccattacttgtttcatctctactccacaatccgaatttactttgccaaaggacccagaaactccattgatcatggttggtccaggtactggtgtcgctccattcagaggtttcgttcaagctagaaaacaattgaaggaacaaggtcaatctttgggtgaagctcacttgtacttcggttgtagatctccacacgaagactacttataccaagaagaattggaaaacgctcaatccgaaggtattatcactttgcacaccgctttctccagaatgccaaaccaaccaaagacttacgtccaacacgttatggaacaagacggtaagaagttgattgaattgttggaccaaggtgctcacttctacatttgtggtgatggttctcaaatggctccagccgttgaagccactttgatgaagtcttacgctgatgttcaccaagtttccgaagccgatgctagattatggttgcaacaattggaagaaaaaggtcgttacgctaaggatgtctgggccggttga

SEQ ID NO: 192 - DNA, 3150 bp, Artificial Sequence
  Description of Artificial Sequence: Synthetic polynucleotide
atgaccatcaaagaaatgccacaacctaagactttcggtgaattgaagaatttgcctttgttgaacaccgataagccagttcaagctttgatgaagattgctgatgaattgggtgaaatcttcaagtttgaagctccaggtagagtcactagatacttgtcatctcaaagattgatcaaagaagcctgcgacgaatccagatttgataagaatttgtctcaagctgctaagttcgctagagattttgctggtgatggtttggttacttcttggactcacgaaaagaattggaagaaggcccataacattttgttgccatctttctcacaacaagccatgaagggttatcatgctatgatggttgatatcgccgttcaattggttcaaaagtgggaaagattgaacgccgatgaacatatcgaagtctctgaagatatgaccagattgaccttggataccattggtttgtgtggtttcaactacagattcaactccttctacagagatcaaccacatccattcatcatctctgctgttagagctgcagatgaagtcatgaacaaattgcaaagagctaatccagacgatccagcttatgacgaaaacaagagacaattccaagaagatatcaaggtcatgaacgatttggtcgataagattatcgctgatagaaaggctagaggtgaacaatctgatgatttgttgacccaaatgttgaacggtaaggatccagaaactggtgaaccattggatgatggtaacatcagataccaaattatcgctttcttgattgctggtcacgaaactacatctggtttgttgtcttttgccttgtactttttggttaagaacccacacgtcttgcaaaaggttgctgaagaagctgcaagagttttggttgatccagttccatcttacaagcaagtcaagcaattgaagtacgttggtatggttttgaacgaagctttgagattgtggccaactgctccagctttttcattatacgctaaagaagataccgtcttgggtggtgaatatccattggaaaaaggtgatgaagttatggtcttgatcccacaattgcatagagataagactgtttggggtgatgatgtcgaagaattcagaccagaaagattcgaaaacccatctgctattccacaacatgcttttaagccatttggtaacggtcaaagagcttgcattggtcaacaattcgctttacatgaagctaccttggttttgggtatgatgttgaaacacttcgacttcgaagatcacaccaactacgaattggatatcaaagaaaccttgaccttgaagccaaagggttttgttgttaaggctaagtccaaaaagattccattgggtggtattccatctccatctactgaacaatccgctaagaaggttagaaagaaagctgaaaacgctcataacacacctttgttggtcttgtacggttctaatatgggtactgctgaaggtacagcaagagatttggcagatattgctatgtctaaaggtttcgctccacaagttgctactttggattctcatgctggtaatttgccaagagaaggtgctgttttgatagttactgcttcttacaatggtcacccaccagataatgctaagcaattcgttgattggttggatcaagcttcagctgatgaagtaaaaggtgttagatactctgttttcggttgcggtgacaaaaattgggctactacttatcaaaaggttccagcctttattgacgaaactttggctgctaaaggtgctgaaaacattgctgacagaggtgaagctgatgcctccgacgacttcgaaggtacttacgaagaatggagagaacacatgtggtctgacgttgctgcttacttcaacttggacatcgaaaactctgaagacaacaagtccactttgtctttgcaattcgttgactccgctgctgacatgccattggctaagatgcacggtgctttctctaccaacgtcgttgcctccaaggaattgcaacaaccaggttctgctagatctactagacacttggaaatcgaattgccaaaggaagcttcctaccaagaaggtgaccacttgggcgttattccaagaaactacgaaggtatcgtcaacagagttactgctagattcggtttggatgcttctcaacaaatcagattagaagctgaagaagaaaagttggctcacttgccattagctaagactgtctccgttgaagaattgttgcaatacgtcgaattgcaagacccagttaccagaacccaattgagagccatggctgccaagaccgtctgtccaccacacaaggttgaattggaagccttgttggaaaagcaagcctacaaggaacaagttttggctaagagattgaccatgttggaattgttggaaaagtacccagcctgcgaaatgaagttctctgaatttatcgccttgttgccatctatcagaccacgttactactctatttcttcctctccacgtgttgacgaaaagcaagcttctattactgtttccgttgtctccggtgaagcttggtccggttacggtgaatacaagggtattgcttctaactacttggctgaattgcaagaaggtgacaccattacttgtttcatctctactccacaatccgaatttactttgccaaaggacccagaaactccattgatcatggttggtccaggtactggtgtcgctccattcagaggtttcgttcaagctagaaaacaattgaaggaacaaggtcaatctttgggtgaagctcacttgtacttcggttgtagatctccacacgaagactacttataccaagaagaattggaaaacgctcaatccgaaggtattatcactttgcacaccgctttctccagaatgccaaaccaaccaaagacttacgtccaacacgttatggaacaagacggtaagaagttgattgaattgttggaccaaggtgctcacttctacatttgtggtgatggttctcaaatggctccagccgttgaagccactttgatgaagtcttacgctgatgttcaccaagtttccgaagccgatgctagattatggttgcaacaattggaagaaaaaggtcgttacgctaaggatgtctgggccggttga

SEQ ID NO: 193 - DNA, 5372 bp, Artificial Sequence
  Description of Artificial Sequence: Synthetic polynucleotide
cctcgccgcagttaattaaagtcagtgagcgaggaagcgcgtaactataacggtcctaaggtagcgaatcctgatgcggtattttctccttacgcatctgtgcggtatttcacaccgcatagatcggcaagtgcacaaacaatacttaaataaatactactcagtaataacctatttcttagcatttttgacgaaatttgctattttgttagagtcttttacaccatttgtctccacacctccgcttacatcaacaccaataacgccatttaatctaagcgcatcaccaacattttctggcgtcagtccaccagctaacataaaatgtaagctttcggggctctcttgccttccaacccagtcagaaatcgagttccaatccaaaagttcacctgtcccacctgcttctgaatcaaacaagggaataaacgaatgaggtttctgtgaagctgcactgagtagtatgttgcagtcttttggaaatacgagtcttttaataactggcaaaccgaggaactcttggtattcttgccacgactcatctccatgcagtggagccaatcaattcttgcggtcaactttggacgatatcaatgccgtaatcattgaccagagccaaaacatcctccttaagttgattacgaaacacgccaaccaagtatttcggagtgcctgaactatttttatatgcttttacaagacttgaaattttccttgcaataaccgggtcaattgttctctttctattgggcacacatataatacccagcaagtcagcatcggaatctagagcacattctgcggcctctgtgctctgcaagccgcaaactttcaccaatggaccagaactacctgtgaaattaataacagacatactccaagctgcctttgtgtgcttaatcacgtatactcacgtgctcaatagtcaccaatgccctccctcttggccctctccttttcttttttcgaccgaattaattcttaatcggcaaaaaaagaaaagctccggatcaagattgtacgtaaggtgacaagctatttttcaataaagaatatcttccactactgccatctggcgtcataactgcaaagtacacatatattacgatgctgttctattaaatgcttcctatattatatatatagtaatgtcgtgatctatggtgcactctcagtacaatctgctctgatgccgcatagttaagccagccccgacacccgccaacacccgctgacgcgccctgacgggcttgtctgctcccggcatccgcttacagacaagctgtgaccgtctccgggagctgcatgtgtcagaggttttcaccgtcatcaccgaaacgcgcgagacgaaagggcctcgtgatacgcctatttttataggttaatgtcatgataataatggtttcttagacggatcgcttgcctgtaacttacacgcgcctcgtatcttttaatgatggaataatttgggaatttactctgtgtttatttatttttatgttttgtatttggattttagaaagtaaataaagaaggtagaagagttacggaatgaagaaaaaaaaataaacaaaggtttaaaaaatttcaacaaaaagcgtactttacatatatatttattagacaagaaaagcagattaaatagatatacattcgattaacgataagtaaaatgtaaaatcacaggattttcgtgtgtggtcttctacacagacaaggtgaaacaattcggcattaatacctgagagcaggaagagcaagataaaaggtagtatttgttggcgatccccctagagtcttttacatcttcggaaaacaaaaactattttttctttaatttctttttttactttctatttttaatttatatatttatattaaaaaatttaaattataattatttttatagcacgtgatgaaaaggacccaggtggcacttttcggggaaatgtgcgcggaacccctatttgtttatttttctaaatacattcaaatatgtatccgctcatgagacaataaccctgataaatgcttcaataatattgaaaaaggaagagtatgagtattcaacatttccgtgtcgcccttattcccttttttgcggcattttgccttcctgtttttgctcacccagaaacgctggtgaaagtaaaagatgctgaagatcagttgggacgcgtagtctagaccagccaggacagaaatgcctcgacttcgctgctacccaaggttgccgggtgacgcacaccgtggaaacggatgaaggcacgaacccagtggacataagcctgttcggttcgtaagctgtaatgcaagtagcgtatgcgctcacgcaactggtccagaaccttgaccgaacgcagcggtggtaacggcgcagtggcggttttcatggcttgttatgactgtttttttggggtacagtctatgcctcgggcatccaagcagcaagcgcgttacgccgtgggtcgatgtttgatgttatggagcagcaacgatgttacgcagcagggcagtcgccctaaaacaaagttaaacattatgagggaagcggtgatcgccgaagtatcgactcaactatcagaggtagttggcgccatcgagcgccatctcgaaccgacgttgctggccgtacatttgtacggctccgcagtggatggcggcctgaagccacacagtgatattgatttgctggttacggtgaccgtaaggcttgatgaaacaacgcggcgagctttgatcaacgaccttttggaaacttcggcttcccctggagagagcgagattctccgcgctgtagaagtcaccattgttgtgcacgacgacatcattccgtggcgttatccagctaagcgcgaactgcaatttggagaatggcagcgcaatgacattcttgcaggtatcttcgagccagccacgatcgacattgatctggctatcttgctgacaaaagcaagagaacatagcgttgccttggtaggtccagcggcggaggaactctttgatccggttcctgaacaggatctatttgaggcgctaaatgaaaccttaacgctatggaactcgccgcccgactgggctggcgatgagcgaaatgtagtgcttacgttgtcccgcatttggtacagcgcagtaaccggcaaaatcgcgccgaaggatgtcgctgccggctgggcaatggagcgcctgccggcccagtatcagcccgtcatacttgaagctagacaggcttatcttggacaagaagaagatcgcttggcctcgcgcgcagatcagttggaagaatttgtccactacgtgaaaggcgagatcaccaaggtagtcggcaaataaccctcgagcattcaaggcgccttgattatttgacgtggtttgatggcctccacgcacgttgtgatatgtagatgattcagttcgagtttatcattatcaatactgccatttcaaagaatacgtaaataattaatagtagtgattttcctaactttatttagtcaaaaaattagccttttaattctgctgtaacccgtacatgcccaaaatagggggcgggttacacagaatatataacatcgtaggtgtctgggtgaacagtttattcctggcatccactaaatataatggagcccgctttttaagctggcatccagaaaaaaaaagaatcccagcaccaaaatattgttttcttcaccaaccatcagttcataggtccattctcttagcgcaactacagagaacaggggcacaaacaggcaaaaaacgggcacaacctcaatggagtgatgcaacctgcctggagtaaatgatgacacaaggcaattgacccacgcatgtatctatctcattttcttacaccttctattaccttctgctctctctgatttggaaaaagctgaaaaaaaaggttgaaaccagttccctgaaattattcccctacttgactaataagtatataaagacggtaggtattgattgtaattctgtaaatctatttcttaaacttcttaaattctacttttatagttagtcttttttttagttttaaaacaccaagaacttagtttcgaataaacacacataaacaaacaaaacaggccccttttcctttgtcgatatcatgtaattagttatgtcacgcttacattcacgccctcctcccacatccgctctaaccgaaaaggaaggagttagacaacctgaagtctaggtccctatttattttttttaatagttatgttagtattaagaacgttatttatatttcaaatttttcttttttttctgtacaaacgcgtgtacgcatgtaacattatactgaaaaccttgcttgagaaggttttgggacgctcgaaggctttaatttgtaatcattatcactttacgggtcctttccggtgatccgacaggttacggggcggcgacctcgcgggttttcgctatttatgaaaattttccggtttaaggcgtttccgttcttcttcgtcataacttaatgtttttatttaaaatacctcgcgagtggcaacactgaaaatacccatggagcggcgtaaccgtcgcacaggatctaggtgaagatcctttttgataatctcatgaccaaaatcccttaacgtgagttttcgttccactgagcgtcagaccccgtagaaaagatcaaaggatcttcttgagatcctttttttctgcgcgtaatctgctgcttgcaaacaaaaaaaccaccgctaccagcggtggtttgtttgccggatcaagagctaccaactctttttccgaaggtaactggcttcagcagagcgcagataccaaatactgtccttctagtgtagccgtagttaggccaccacttcaagaactctgtagcaccgcctacatacctcgctctgctaatcctgttaccagtggctgctgccagtggcgataagtcgtgtcttaccgggttggactcaagacgatagttaccggataaggcgcagcggtcgggctgaacggggggttcgtgcacacagcccagcttggagcgaacgacctacaccgaactgagatacctacagcgtgagctatgagaaagcgccacgcttcccgaagggagaaaggcggacaggtatccggtaagcggcagggtcggaacaggagagcgcacgagggagcttccagggggaaacgcctggtatctttatagtcctgtcgggtttcgccacctctgacttgagcgtcgatttttgtgatgctcgtcaggggggcggagcctatggaaaaacgccagcaacgcggcagtggaacgtgcattatgaattagttacgctagggataacagggtaatatagaacccgaacgaccgagcgcagcggcggccgcgctgataccgccgc

SEQ ID NO: 194 - DNA, 4977 bp, Artificial Sequence
  Description of Artificial Sequence: Synthetic polynucleotide
aacgacctacaccgaactgagatacctacagcgtgagctatgagaaagcgccacgcttcccgaagggagaaaggcggacaggtatccggtaagcggcagggtcggaacaggagagcgcacgagggagcttccagggggaaacgcctggtatctttatagtcctgtcgggtttcgccacctctgacttgagcgtcgatttttgtgatgctcgtcaggggggcggagcctatggaaaaacgccagcaacgcggcagtggaacgtgcattatgaattagttacgctagggataacagggtaatatagaacccgaacgaccgagcgcagcggcggccgcgctgataccgccgccctcgccgcagttaattaaagtcagtgagcgaggaagcgcgtaactataacggtcctaaggtagcgaatcctgatgcggtattttctccttacgcatctgtgcggtatttcacaccgcatagatcggcaagtgcacaaacaatacttaaataaatactactcagtaataacctatttcttagcatttttgacgaaatttgctattttgttagagtcttttacaccatttgtctccacacctccgcttacatcaacaccaataacgccatttaatctaagcgcatcaccaacattttctggcgtcagtccaccagctaacataaaatgtaagctttcggggctctcttgccttccaacccagtcagaaatcgagttccaatccaaaagttcacctgtcccacctgcttctgaatcaaacaagggaataaacgaatgaggtttctgtgaagctgcactgagtagtatgttgcagtcttttggaaatacgagtcttttaataactggcaaaccgaggaactcttggtattcttgccacgactcatctccatgcagtggagccaatcaattcttgcggtcaactttggacgatatcaatgccgtaatcattgaccagagccaaaacatcctccttaagttgattacgaaacacgccaaccaagtatttcggagtgcctgaactatttttatatgcttttacaagacttgaaattttccttgcaataaccgggtcaattgttctctttctattgggcacacatataatacccagcaagtcagcatcggaatctagagcacattctgcggcctctgtgctctgcaagccgcaaactttcaccaatggaccagaactacctgtgaaattaataacagacatactccaagctgcctttgtgtgcttaatcacgtatactcacgtgctcaatagtcaccaatgccctccctcttggccctctccttttcttttttcgaccgaattaattcttaatcggcaaaaaaagaaaagctccggatcaagattgtacgtaaggtgacaagctatttttcaataaagaatatcttccactactgccatctggcgtcataactgcaaagtacacatatattacgatgctgttctattaaatgcttcctatattatatatatagtaatgtcgtgatctatggtgcactctcagtacaatctgctctgatgccgcatagttaagccagccccgacacccgccaacacccgctgacgcgccctgacgggcttgtctgctcccggcatccgcttacagacaagctgtgaccgtctccgggagctgcatgtgtcagaggttttcaccgtcatcaccgaaacgcgcgagacgaaagggcctcgtgatacgcctatttttataggttaatgtcatgataataatggtttcttagacggatcgcttgcctgtaacttacacgcgcctcgtatcttttaatgatggaataatttgggaatttactctgtgtttatttatttttatgttttgtatttggattttagaaagtaaataaagaaggtagaagagttacggaatgaagaaaaaaaaataaacaaaggtttaaaaaatttcaacaaaaagcgtactttacatatatatttattagacaagaaaagcagattaaatagatatacattcgattaacgataagtaaaatgtaaaatcacaggattttcgtgtgtggtcttctacacagacaaggtgaaacaattcggcattaatacctgagagcaggaagagcaagataaaaggtagtatttgttggcgatccccctagagtcttttacatcttcggaaaacaaaaactattttttctttaatttctttttttactttctatttttaatttatatatttatattaaaaaatttaaattataattatttttatagcacgtgatgaaaaggacccaggtggcacttttcggggaaatgtgcgcggaacccctatttgtttatttttctaaatacattcaaatatgtatccgctcatgagacaataaccctgataaatgcttcaataatattgaaaaaggaagagtatgagtattcaacatttccgtgtcgcccttattcccttttttgcggcattttgccttcctgtttttgctcacccagaaacgctggtgaaagtaaaagatgctgaagatcagttgggacgcgtagtctagaccagccaggacagaaatgcctcgacttcgctgctacccaaggttgccgggtgacgcacaccgtggaaacggatgaaggcacgaacccagtggacataagcctgttcggttcgtaagctgtaatgcaagtagcgtatgcgctcacgcaactggtccagaaccttgaccgaacgcagcggtggtaacggcgcagtggcggttttcatggcttgttatgactgtttttttggggtacagtctatgcctcgggcatccaagcagcaagcgcgttacgccgtgggtcgatgtttgatgttatggagcagcaacgatgttacgcagcagggcagtcgccctaaaacaaagttaaacattatgagggaagcggtgatcgccgaagtatcgactcaactatcagaggtagttggcgccatcgagcgccatctcgaaccgacgttgctggccgtacatttgtacggctccgcagtggatggcggcctgaagccacacagtgatattgatttgctggttacggtgaccgtaaggcttgatgaaacaacgcggcgagctttgatcaacgaccttttggaaacttcggcttcccctggagagagcgagattctccgcgctgtagaagtcaccattgttgtgcacgacgacatcattccgtggcgttatccagctaagcgcgaactgcaatttggagaatggcagcgcaatgacattcttgcaggtatcttcgagccagccacgatcgacattgatctggctatcttgctgacaaaagcaagagaacatagcgttgccttggtaggtccagcggcggaggaactctttgatccggttcctgaacaggatctatttgaggcgctaaatgaaaccttaacgctatggaactcgccgcccgactgggctggcgatgagcgaaatgtagtgcttacgttgtcccgcatttggtacagcgcagtaaccggcaaaatcgcgccgaaggatgtcgctgccggctgggcaatggagcgcctgccggcccagtatcagcccgtcatacttgaagctagacaggcttatcttggacaagaagaagatcgcttggcctcgcgcgcagatcagttggaagaatttgtccactacgtgaaaggcgagatcaccaaggtagtcggcaaataaccctcgagcattcaaggcgccttgattatttgacgtggtttgatggcctccacgcacgttgtgatatgtagatgagagcgttggttggtggatcaagcccacgcgtaggcaatcctcgagcagatccgccaggcgtgtatatatagcgtggatggccaggcaactttagtgctgacacatacaggcatatatatatgtgtgcgacaacacatgatcatatggcatgcatgtgctctgtatgtatataaaactcttgttttcttcttttctctaaatattctttccttatacattaggacctttgcagcataaattactatacttctatagacacacaaacacaaatacacacactaaattaataacaggccccttttcctttgtcgatatcatgtaattagttatgtcacgcttacattcacgccctccccccacatccgctctaaccgaaaaggaaggagttagacaacctgaagtctaggtccctatttatttttttatagttatgttagtattaagaacgttatttatatttcaaatttttcttttttttctgtacaaacgcgtgtacgcatgtaacattatactgaaaaccttgcttgagaaggttttgggacgctcgaaggctttaatttgtaatcattatcactttacgggtcctttccggtgatccgacaggttacggggcggcgacctcgcgggttttcgctatttatgaaaattttccggtttaaggcgtttccgttcttcttcgtcataacttaatgtttttatttaaaatacctcgcgagtggcaacactgaaaatacccatggagcggcgtaaccgtcgcacaggatctaggtgaagatcctttttgataatctcatgaccaaaatcccttaacgtgagttttcgttccactgagcgtcagaccccgtagaaaagatcaaaggatcttcttgagatcctttttttctgcgcgtaatctgctgcttgcaaacaaaaaaaccaccgctaccagcggtggtttgtttgccggatcaagagctaccaactctttttccgaaggtaactggcttcagcagagcgcagataccaaatactgtccttctagtgtagccgtagttaggccaccacttcaagaactctgtagcaccgcctacatacctcgctctgctaatcctgttaccagtggctgctgccagtggcgataagtcgtgtcttaccgggttggactcaagacgatagttaccggataaggcgcagcggtcgggctgaacggggggttcgtgcacacagcccagcttggagcg

SEQ ID NO: 195 - DNA, 5079 bp, Artificial Sequence
  Description of Artificial Sequence: Synthetic polynucleotide
acgacctacaccgaactgagatacctacagcgtgagctatgagaaagcgccacgcttcccgaagggagaaaggcggacaggtatccggtaagcggcagggtcggaacaggagagcgcacgagggagcttccagggggaaacgcctggtatctttatagtcctgtcgggtttcgccacctctgacttgagcgtcgatttttgtgatgctcgtcaggggggcggagcctatggaaaaacgccagcaacgcggcagtggaacgtgcattatgaattagttacgctagggataacagggtaatatagaacccgaacgaccgagcgcagcggcggccgcgctgataccgccgccctcgccgcagttaattaaagtcagtgagcgaggaagcgcgtaactataacggtcctaaggtagcgaatcctgatgcggtattttctccttacgcatctgtgcggtatttcacaccgcatagatcggcaagtgcacaaacaatacttaaataaatactactcagtaataacctatttcttagcatttttgacgaaatttgctattttgttagagtcttttacaccatttgtctccacacctccgcttacatcaacaccaataacgccatttaatctaagcgcatcaccaacattttctggcgtcagtccaccagctaacataaaatgtaagctttcggggctctcttgccttccaacccagtcagaaatcgagttccaatccaaaagttcacctgtcccacctgcttctgaatcaaacaagggaataaacgaatgaggtttctgtgaagctgcactgagtagtatgttgcagtcttttggaaatacgagtcttttaataactggcaaaccgaggaactcttggtattcttgccacgactcatctccatgcagtggagccaatcaattcttgcggtcaactttggacgatatcaatgccgtaatcattgaccagagccaaaacatcctccttaagttgattacgaaacacgccaaccaagtatttcggagtgcctgaactatttttatatgcttttacaagacttgaaattttccttgcaataaccgggtcaattgttctctttctattgggcacacatataatacccagcaagtcagcatcggaatctagagcacattctgcggcctctgtgctctgcaagccgcaaactttcaccaatggaccagaactacctgtgaaattaataacagacatactccaagctgcctttgtgtgcttaatcacgtatactcacgtgctcaatagtcaccaatgccctccctcttggccctctccttttcttttttcgaccgaattaattcttaatcggcaaaaaaagaaaagctccggatcaagattgtacgtaaggtgacaagctatttttcaataaagaatatcttccactactgccatctggcgtcataactgcaaagtacacatatattacgatgctgttctattaaatgcttcctatattatatatatagtaatgtcgtgatctatggtgcactctcagtacaatctgctctgatgccgcatagttaagccagccccgacacccgccaacacccgctgacgcgccctgacgggcttgtctgctcccggcatccgcttacagacaagctgtgaccgtctccgggagctgcatgtgtcagaggttttcaccgtcatcaccgaaacgcgcgagacgaaagggcctcgtgatacgcctatttttataggttaatgtcatgataataatggtttcttagacggatcgcttgcctgtaacttacacgcgcctcgtatcttttaatgatggaataatttgggaatttactctgtgtttatttatttttatgttttgtatttggattttagaaagtaaataaagaaggtagaagagttacggaatgaagaaaaaaaaataaacaaaggtttaaaaaatttcaacaaaaagcgtactttacatatatatttattagacaagaaaagcagattaaatagatatacattcgattaacgataagtaaaatgtaaaatcacaggattttcgtgtgtggtcttctacacagacaaggtgaaacaattcggcattaatacctgagagcaggaagagcaagataaaaggtagtatttgttggcgatccccctagagtcttttacatcttcggaaaacaaaaactattttttctttaatttctttttttactttctatttttaatttatatatttatattaaaaaatttaaattataattatttttatagcacgtgatgaaaaggacccaggtggcacttttcggggaaatgtgcgcggaacccctatttgtttatttttctaaatacattcaaatatgtatccgctcatgagacaataaccctgataaatgcttcaataatattgaaaaaggaagagtatgagtattcaacatttccgtgtcgcccttattcccttttttgcggcattttgccttcctgtttttgctcacccagaaacgctggtgaaagtaaaagatgctgaagatcagttgggacgcgtagtctagaccagccaggacagaaatgcctcgacttcgctgctacccaaggttgccgggtgacgcacaccgtggaaacggatgaaggcacgaacccagtggacataagcctgttcggttcgtaagctgtaatgcaagtagcgtatgcgctcacgcaactggtccagaaccttgaccgaacgcagcggtggtaacggcgcagtggcggttttcatggcttgttatgactgtttttttggggtacagtctatgcctcgggcatccaagcagcaagcgcgttacgccgtgggtcgatgtttgatgttatggagcagcaacgatgttacgcagcagggcagtcgccctaaaacaaagttaaacattatgagggaagcggtgatcgccgaagtatcgactcaactatcagaggtagttggcgccatcgagcgccatctcgaaccgacgttgctggccgtacatttgtacggctccgcagtggatggcggcctgaagccacacagtgatattgatttgctggttacggtgaccgtaaggcttgatgaaacaacgcggcgagctttgatcaacgaccttttggaaacttcggcttcccctggagagagcgagattctccgcgctgtagaagtcaccattgttgtgcacgacgacatcattccgtggcgttatccagctaagcgcgaactgcaatttggagaatggcagcgcaatgacattcttgcaggtatcttcgagccagccacgatcgacattgatctggctatcttgctgacaaaagcaagagaacatagcgttgccttggtaggtccagcggcggaggaactctttgatccggttcctgaacaggatctatttgaggcgctaaatgaaaccttaacgctatggaactcgccgcccgactgggctggcgatgagcgaaatgtagtgcttacgttgtcccgcatttggtacagcgcagtaaccggcaaaatcgcgccgaaggatgtcgctgccggctgggcaatggagcgcctgccggcccagtatcagcccgtcatacttgaagctagacaggcttatcttggacaagaagaagatcgcttggcctcgcgcgcagatcagttggaagaatttgtccactacgtgaaaggcgagatcaccaaggtagtcggcaaataaccctcgagcattcaaggcgccttgattatttgacgtggtttgatggcctccacgcacgttgtgatatgtagatgactcgtaggaacaatttcgggcccctgcgtgttcttctgaggttcatcttttacatttgcttctgctggataattttcagaggcaacaaggaaaaattagatggcaaaaagtcgtctttcaaggaaaaatccccaccatctttcgagatcccctgtaacttattggcaactgaaagaatgaaaaggaggaaaatacaaaatatactagaactgaaaaaaaaaaagtataaatagagacgatatatgccaatacttcacaatgttcgaatctattcttcatttgcagctattgtaaaataataaaacatcaagaacaaacaagctcaacttgtcttttctaagaacaaagaataaacacaaaaacaaaaagtttttttaattttaatcaaaaaacaggccccttttcctttgtcgatatcatgtaattagttatgtcacgcttacattcacgccctccccccacatccgctctaaccgaaaaggaaggagttagacaacctgaagtctaggtccctatttatttttttatagttatgttagtattaagaacgttatttatatttcaaatttttcttttttttctgtacaaacgcgtgtacgcatgtaacattatactgaaaaccttgcttgagaaggttttgggacgctcgaaggctttaatttgtaatcattatcactttacgggtcctttccggtgatccgacaggttacggggcggcgacctcgcgggttttcgctatttatgaaaattttccggtttaaggcgtttccgttcttcttcgtcataacttaatgtttttatttaaaatacctcgcgagtggcaacactgaaaatacccatggagcggcgtaaccgtcgcacaggatctaggtgaagatcctttttgataatctcatgaccaaaatcccttaacgtgagttttcgttccactgagcgtcagaccccgtagaaaagatcaaaggatcttcttgagatcctttttttctgcgcgtaatctgctgcttgcaaacaaaaaaaccaccgctaccagcggtggtttgtttgccggatcaagagctaccaactctttttccgaaggtaactggcttcagcagagcgcagataccaaatactgtccttctagtgtagccgtagttaggccaccacttcaagaactctgtagcaccgcctacatacctcgctctgctaatcctgttaccagtggctgctgccagtggcgataagtcgtgtcttaccgggttggactcaagacgatagttaccggataaggcgcagcggtcgggctgaacggggggttcgtgcacacagcccagcttggagcga

What is claimed is:

1. A method of producing codeinone within an engineered non-plant cell, the method comprising:
within the engineered non-plant cell, producing a thebaine product;
within the engineered non-plant cell, contacting the thebaine product with an enzyme having thebaine 6-O-demethylase activity, thereby producing a neopinone product; and
within the engineered non-plant cell, contacting the neopinone product with a neopinone isomerase, thereby producing a codeinone product.

2. The method of claim 1, wherein the neopinone isomerase is an engineered neopinone isomerase.

3. The method of claim 1, further comprising:
within the engineered non-plant cell, contacting the codeinone product with an enzyme having morphinone reductase activity, thereby producing a hydrocodone product.

4. The method of claim 1, further comprising:
within the engineered non-plant cell, contacting the codeinone product with an enzyme having codeinone reductase activity, thereby producing a codeine product.

5. The method of claim 1, further comprising:
within the engineered non-plant cell, contacting the codeinone product with an enzyme having morphine dehydrogenase activity, thereby producing a codeine product.

6. A method of isomerizing neopinone within an engineered non-plant cell, the method comprising:
contacting a neopinone product with a neopinone isomerase,
wherein contacting the neopinone product with the neopinone isomerase isomerizes the neopinone product to a codeinone product, and
wherein the neopinone isomerase is produced by culturing an engineered non-plant cell having at least one coding sequence, encoded within a chromosome within the engineered non-plant cell, for encoding the neopinone isomerase.

7. The method of claim 6, wherein the neopinone isomerase is an engineered neopinone isomerase.

8. The method of claim 6, further comprising:
within the engineered non-plant cell, contacting the codeinone product with an enzyme having morphinone reductase activity, thereby producing a hydrocodone product.

9. The method of claim 6, further comprising:
within the engineered non-plant cell, contacting the codeinone product with an enzyme having codeinone reductase activity, thereby producing a codeine product.

10. The method of claim 6, further comprising:
within the engineered non-plant cell, contacting the codeinone product with an enzyme having morphine dehydrogenase activity, thereby producing a codeine product.

11. The method of claim 1, wherein at least one of products selected from the group consisting of the thebaine product and the neopinone product is produced within the engineered non-plant cell from a simple starting material.

12. The method of claim 11, wherein the simple starting material comprises a sugar.

13. The method of claim 1, further comprising:
contacting the codeinone product, or a derivative thereof, with one or more enzymes selected from the group consisting of: morphinone reductase, morphine dehydrogenase, codeinone reductase, N-demethylase, N-methyltransferase, and neopinone isomerase,
thereby producing at least one product selected from the group consisting of: a neopinone, 14-Hydroxycodeinone, oxycodone, oxymorphone, noroxymorphone, noroxymorphol, buprenorphine, naloxone, naltrexone, and nalbuphine.

14. The method of claim 3, further comprising:
contacting the hydrocodone product, or a derivative thereof, with one or more enzymes selected from the group consisting of: a morphine dehydrogenase, codeinone reductase, and codeine O-demethylase,
thereby producing at least one product selected from the group consisting of: hydromorphone and dihydrocodeine.

15. The method of claim 4, further comprising:
contacting the codeine product, or a derivative thereof, with one or more enzymes selected from the group consisting of: morphine dehydrogenase, codeinone reductase, codeine O-demethylase, and neopinone isomerase,
thereby producing at least one product selected from the group consisting of: a codeinone, neopinone, neopine, neomorphine, morphine, neomorphinone, and morphinone.

16. The method of claim 1, wherein the engineered non-plant cell is an engineered fungal cell or an engineered bacteria cell.

17. The method of claim 16, wherein the engineered non-plant cell is an engineered fungal cell.

18. The method of claim 16, wherein the engineered non-plant cell is an engineered bacteria cell.
